United States Patent Application Publication US 2008/0318210 A1 - sequence listing, part 11

SEQ ID NO: 392188 - RNA, 74 nt, Homo sapiens
uagguugucuuucaggguuuuuauaguuuuagguuuuacauuuaagacuguaauccaucuugaguuaauuucug

SEQ ID NO: 392189 - RNA, 75 nt, Homo sapiens
uguucugggaucccuguaguaauauucuagcuuucuccaugcaagugaaugcuguacuacagugauuuucaaaca

SEQ ID NO: 392190 - RNA, 84 nt, Homo sapiens
cagggcuguguagugcaaugagaaggggcucuggagccaaacacagccagguuccaacccugguuccuucauuuuccaguuuug

SEQ ID NO: 392191 - RNA, 72 nt, Homo sapiens
gauaagcuaagaguuucugggcuucuucaggaaaaucccucaggaacagagccuagaaagcucuagauuguc

SEQ ID NO: 392192 - RNA, 114 nt, Homo sapiens
gacuacagggagaccucugucaugccucuggucccagggccaugacuccagauacuggcucuuccggagccauggcccugggaaaggaggcauggcagaggugucccuguaguc

SEQ ID NO: 392193 - RNA, 81 nt, Homo sapiens
cagccagauaaugucagguaaaaguauaacuuaugacucagucagagcaaugcuuuugcuuugauauaucgauguuggcug

SEQ ID NO: 392194 - RNA, 72 nt, Homo sapiens
uauguaguuagaagauucaaacagauuucucuagaaaaagcaguaggguuauggaaacuucuagcuuacgua

SEQ ID NO: 392195 - RNA, 62 nt, Homo sapiens
uagcacuauguuaucacauacuagguagugucuuuucuauuuuggugguauacaugcugcua

SEQ ID NO: 392196 - RNA, 129 nt, Homo sapiens
cauucccugagauaggucacucucccuuucugaagcucugacucuucaucgauaagauagggacacuaaucuucucuugaaggguggggaagauaagaugaagugguaagugacuucacauaguggaug

SEQ ID NO: 392197 - RNA, 79 nt, Homo sapiens
ccaugaucagaugguggcaagagccaagucuucucacauaaagagaaaucacauugaaucugcuaccuacgaccacugg

SEQ ID NO: 392198 - RNA, 69 nt, Homo sapiens
ucauggggugcuuugcuagauuucuacuuguuauacccuguaaggggccuggacaaagcuauuuuaugg

SEQ ID NO: 392199 - RNA, 65 nt, Homo sapiens
cagaagcuggugccccgggggcaguuggacagcccauggacauccccgggagcaccagcuuguug

SEQ ID NO: 392200 - RNA, 96 nt, Homo sapiens
auuuauguauguauguauguauguauguauuuacuuauuuauuauacuuuaaguucugggauacacgugcagaacaugcagguuuguuacauaggu

SEQ ID NO: 392201 - RNA, 66 nt, Homo sapiens
aaaggcaguguggguagagggcaagaaagucugaucgucuugucuguaaucccaauacuacccuuu

SEQ ID NO: 392202 - RNA, 69 nt, Homo sapiens
cgcagggauuguauguauguaugcauguguaugaauauauguuauguauacauauguauguuuugugcg

SEQ ID NO: 392203 - RNA, 82 nt, Homo sapiens
auauuuaccauuaaggcacucuucugugugccugguaugcaccauguaagaaguacagcugccuuugcuaugguuuggaugu

SEQ ID NO: 392204 - RNA, 63 nt, Homo sapiens
ggcuuguguauuaucucugaaucaccugcuaccuuggcauucuuucaguagugcacauaagcc

SEQ ID NO: 392205 - RNA, 79 nt, Homo sapiens
gguccuaauggaggacaaugucaccuucagauggugugugcaucucuggaggacguguccaccaugaaagauuuggacu

SEQ ID NO: 392206 - RNA, 113 nt, Homo sapiens
caauauugcaggggauguacacacccucugugauguuguuccuaguauccaaaaguagagacgaugauauuacuggcuauaucgcaagggguguacacccuucugugauauug

SEQ ID NO: 392207 - RNA, 90 nt, Homo sapiens
uccuaauccccauaacuuuugaauauguaugcuuaugugguaaaaacgacauugcagauguguuuaauguuaacaaucuugagauaagga

SEQ ID NO: 392208 - RNA, 78 nt, Homo sapiens
gggaggugaugagaucauaaguguggagccucaugaaugggaugagugcccuuauaaaaguggucucagaaagcuccc

SEQ ID NO: 392209 - RNA, 88 nt, Homo sapiens
ggagaauggcaugaacccgggagguggagcuugcagugagcagagaucacgccacugcacuccagccugggcaacagagcgagacucc

SEQ ID NO: 392210 - RNA, 67 nt, Homo sapiens
uuucagaucaucugggucccaugaucuuauuucauagaugagucaauggaggcucagagccaugaag

SEQ ID NO: 392211 - RNA, 65 nt, Homo sapiens
uuaauguaucuaucacaucacauaguuaccaauuuguauauguguguaugugguaagaacauuaa

SEQ ID NO: 392212 - RNA, 55 nt, Homo sapiens
gcaaaggucacuuuguuaagcacuagcgaagagcuuugcugcauugugaccuugc

SEQ ID NO: 392213 - RNA, 86 nt, Homo sapiens
gagaauugcuugaacccaggagguggagguuguagugagccgagauugcacuacugcacuccagccugggugacagagugagacuc

SEQ ID NO: 392214 - RNA, 100 nt, Homo sapiens
ggcucgcgagggggauacggggaaauggggccuucuccggggcugagcugguugggccgcugcaggauggucccgcgccucaguuucccugucugggguc

SEQ ID NO: 392215 - RNA, 61 nt, Homo sapiens
gugcgguauuagcaagccaacacagcugcagauuuaaagcugaugguuuaaauacccguau

SEQ ID NO: 392216 - RNA, 83 nt, Homo sapiens
uucuaucauagucaguggaguaaauguaauuucuaaaacaagcugaguuuauguauacuuaacuggaaaaaauugaaauggaa

SEQ ID NO: 392217 - RNA, 66 nt, Homo sapiens
aguaagacccuccuucucaguaugguugaaauccaguaucauuauuacuugagacagggucuugcu

SEQ ID NO: 392218 - RNA, 104 nt, Homo sapiens
gggucuuggggguggggaagaccuauauugacuuuccccacaaaugauugcaggcauuugugguagaaauguagaugcuagggaucuccaacucaccuuuuccu

SEQ ID NO: 392219 - RNA, 55 nt, Homo sapiens
cugguaagaaggucuaagucaauccauuaguugauucacagaauaguuuuaccag

SEQ ID NO: 392220 - RNA, 70 nt, Homo sapiens
ucacuugaaccuaggagguugcagugagcugagaucaugccauugcacuucagccuaggugacagaguga

SEQ ID NO: 392221 - RNA, 107 nt, Homo sapiens
cacccgaugcccccuuagacuguuguaaugcacagcuggucauuuaagagcccugagaaguccuuggaucauggaguauuugcaagucuaacgggaggcacuuggug

SEQ ID NO: 392222 - RNA, 55 nt, Homo sapiens
uuucucaguguuucaggguagguuauaagcaaaguuacuuugaaaauacuggaaa

SEQ ID NO: 392223 - RNA, 74 nt, Homo sapiens
aauucccuuaaugcuugguuguuuggaaaauauuuuauuuuccuuucccuuaugaaguuuaguuaggugggauu

SEQ ID NO: 392224 - RNA, 59 nt, Homo sapiens
uucauuguguuuaucauacaagagcaaagugagccaagcucaguggauagaacaaugaa

SEQ ID NO: 392225 - RNA, 80 nt, Homo sapiens
uuugccguuaauauuagguuggugccaaaguaaucgugguuuuugccauuauuuuugcaccaaccuaauacaucugcaaa

SEQ ID NO: 392226 - RNA, 88 nt, Homo sapiens
uuaugauaguuuacugagaaugaugauuuccaauuucauccaugucccuacaaaggaaaugaacucaucauuuuuuauggcugcauag

SEQ ID NO: 392227 - RNA, 76 nt, Homo sapiens
agguuggugccaaaguaauuacgguuuuggccauuauguucaaugacaacaaccacaauuacuuuugcaccaaccu

SEQ ID NO: 392228 - RNA, 76 nt, Homo sapiens
uugcuugaacccaggaggcggagguugcagugagccaagaucgugccacugcacuccacccuuggcagcagagcga

SEQ ID NO: 392229 - RNA, 108 nt, Homo sapiens
aaauuguaaugcugauguaaagauguagaaguaaggggauguuguaaaauaugucauacuauuucaugaauguuugcuuacuuccauaauaucagaauauaucaauuu

SEQ ID NO: 392230 - RNA, 66 nt, Homo sapiens
ugucauguggcuaacgauucaugccaaagguuguccgcaucuuauguaucagugaguuaucugaca

SEQ ID NO: 392231 - RNA, 65 nt, Homo sapiens
ggugaaucugacaauuaugugucuugggguugcucuucucgaggaguaucuuugugguguucucu

SEQ ID NO: 392232 - RNA, 62 nt, Homo sapiens
aaugcuuuacuuuuuuggcauuugcaccaguaaaaggagaccugccaagaaaugaggguauu

SEQ ID NO: 392233 - RNA, 71 nt, Homo sapiens
gcuugaacccgaggcggagguugcagugagccgaaaucgcgccauuguacuccagccugggcgacaagagc

SEQ ID NO: 392234 - RNA, 100 nt, Homo sapiens
gaggcaggagaaucguuugaaccugggaugcggagguugcggugaguggauauugcgccauugcacugcagcccgggcaacaagagcgaaacuccgucuc

SEQ ID NO: 392235 - RNA, 77 nt, Homo sapiens
ggacuccuuuggcacuguugccggccugaauuggacccccaauucugccacuccagcaguaguagccaaauuaguuu

SEQ ID NO: 392236 - RNA, 78 nt, Homo sapiens
gguaauugaggcacucuguacaaaucugcagguaaaugucaagcacacugacagggcauggugcagaguucugaggcc

SEQ ID NO: 392237 - RNA, 71 nt, Homo sapiens
aaauauguauuaugcacacacguguuuaugugugcauauauacauguacagguguguguauauauauauuu

SEQ ID NO: 392238 - RNA, 83 nt, Homo sapiens
auguugcaguuuaauuauccuauugaaaauguguuaaacgcucccaaguacaucaugaauaaggauuauuaaauuugcagcau

SEQ ID NO: 392239 - RNA, 61 nt, Homo sapiens
augaaaucauguaguuauugcaagauugcaauuugucuuugcauauauuucaugguuuugu

SEQ ID NO: 392240 - RNA, 81 nt, Homo sapiens
guucaucacucuuuauugcugaguaguauuucauuguauggcuauaccauauuuuguuuaucugcucaccaguugaugaac

SEQ ID NO: 392241 - RNA, 64 nt, Homo sapiens
uugagaaccucugugugcccacuggucaauuuccucuuccuucaguuuacagggagguuuuuaa

SEQ ID NO: 392242 - RNA, 108 nt, Homo sapiens
cagaucagaagcagcauucgauugucauaggagugugaacccuaugaacugcacaugcaagggaucuagguugcacacuccuuaugagagucuaugccugaugaucug

SEQ ID NO: 392243 - RNA, 88 nt, Homo sapiens
ggagaaucacuugaacccaggaggcgcagguugcggugagccgaggucaugccauugcacuccauccugggcaauagagugagacucc

SEQ ID NO: 392244 - RNA, 55 nt, Homo sapiens
cugagaucguggggcugcuguccaaccuagaagacagaguaagacccauucucgg

SEQ ID NO: 392245 - RNA, 64 nt, Homo sapiens
cgagccuauggguguuauugcaugggagaugggucucuugaagacaacauaccauuuggucuug

SEQ ID NO: 392246 - RNA, 71 nt, Homo sapiens
auuugugccuuuucugagcaaugagcagagcacuguguguguggccauagugucaggaaagggucgcaagu

SEQ ID NO: 392247 - RNA, 57 nt, Homo sapiens
uauagcaugacacuuguugaaugcuggagaaggccagcgcggugacucaugccugua

SEQ ID NO: 392248 - RNA, 105 nt, Homo sapiens
gguuuugaaauacgaaagagacaugaguuuugggaggggccaggggcagaauggcaugguuaggcuuuguguccccacccaaaucucaucucgaauuuuaauccc

SEQ ID NO: 392249 - RNA, 69 nt, Homo sapiens
ucaucucuugccagucagaauggugauuauuaaaaaguccagaaacuauagaugcuggcgaggcugugg

SEQ ID NO: 392250 - RNA, 59 nt, Homo sapiens
caggccugcuguguaugauuuugugggcuaugcagugcauggucauacauggcacccug

SEQ ID NO: 392251 - RNA, 101 nt, Homo sapiens
agugagagguauggcagaagaggugaggagucagacugugcaaggucuuagaggacuuuuagggauuuuggucauuugccuaucugcaaugggaaguuacu

SEQ ID NO: 392252 - RNA, 61 nt, Homo sapiens
gcuacugcacaucaucugaguuaaaaaugagaauggcuuggcuuggaaugauggcaguggc

SEQ ID NO: 392253 - RNA, 65 nt, Homo sapiens
ggguuauuggaacuguucguauugaaaucacguagaucuucuugcccuacgguucccuagaaccc

SEQ ID NO: 392254 - RNA, 69 nt, Homo sapiens
uuaggacaccagguuauuuaaaacguauaaaaauacuaaauaauggguaagaauggcucuggguucuaa

SEQ ID NO: 392255 - RNA, 73 nt, Homo sapiens
ggagaggugggauggagagaagguaugagcuaaaaauccccaagcucugccauccucccuccccuacuucucc

SEQ ID NO: 392256 - RNA, 95 nt, Homo sapiens
uuuuuucucccauucaugcugucagaaauuuauuaaaaagcaaaugaagugugauaauaguuuuuaagugaauuugacagguaaugaagaaaaaa

SEQ ID NO: 392257 - RNA, 66 nt, Homo sapiens
aagauccugccauugccccuggcuuccaggaacugaacuggauucugagcaucauggcagaaucuu

SEQ ID NO: 392258 - RNA, 59 nt, Homo sapiens
uuuuccucuauguguucuucuaaaguauaguuuugcaagauguuaacauuggaggaaaa

SEQ ID NO: 392259 - RNA, 89 nt, Homo sapiens
gcauuagauucuuacaggagcaugaacccuauugugaacugugcaugugagggauauagguuguugcaugcuccuuaggagacuaaugc

SEQ ID NO: 392260 - RNA, 61 nt, Homo sapiens
uugauauguuguuagauucaguuagcuaguauuuuguuaaggauucuagcaucuaugucaa

SEQ ID NO: 392261 - RNA, 70 nt, Homo sapiens
gcugucaguggagcuacaauucuggggucuagaggacaguggcccucuucucacagcuccacuaggcagu

SEQ ID NO: 392262 - RNA, 113 nt, Homo sapiens
acuaaaauugguuucuaguuaaaaccaaucugaauucacauuaaacuuucccuuugaagcaaguuggaaguauaaacuuaguggaguacagugggacugguagccauuuuagu

SEQ ID NO: 392263 - RNA, 66 nt, Homo sapiens
cuggaggggaccuugggacaagggcuucuuugguagcccuggccagguucacaggcuuccuuucag

SEQ ID NO: 392264 - RNA, 79 nt, Homo sapiens
gagcaggaacucagugccagaaugauacuguuaacgaaagaucucaccaaucuuucucuucaugucguuuuuccuguuc

SEQ ID NO: 392265 - RNA, 82 nt, Homo sapiens
gagcauugaaguuguggaaugcuguagguuuuagcacuuauuuuuaaauugcagguucuuacagucaaguuacauuucucuc

SEQ ID NO: 392266 - RNA, 128 nt, Homo sapiens
cuccugaucucaaaugauccacccaccuuggccuuccaaagugcugggacuggccggggaugauggcucacgccuguaaucccagcacuuugggaggcugaggcggguggaaaucacaaggucaggag

SEQ ID NO: 392267 - RNA, 58 nt, Homo sapiens
gauaucccuuagagcggggugguucugaaguuggagccuggcccauuuaagggacauu

SEQ ID NO: 392268 - RNA, 60 nt, Homo sapiens
uugugguugauacacguaggaauucccucagugucauggaagccuacuagucagcuauaa

SEQ ID NO: 392269 - RNA, 64 nt, Homo sapiens
auugugaauagugcugcaauaaacauaugugugcaugugucuucauagcagcaugauuuauaau

SEQ ID NO: 392270 - RNA, 101 nt, Homo sapiens
ugagauggagucucgcucuguugccuaggcuggaaugcaguggugccaucucggcucacuguaaacuccaccucccagguucaaacgauucuccugccuca

SEQ ID NO: 392271 - RNA, 82 nt, Homo sapiens
cagguuuucaaagaucagaugguaguagaugugugguuuuauuucugaaaccucuguucuguuccauuggucuauauaucug

SEQ ID NO: 392272 - RNA, 82 nt, Homo sapiens
uacaaagaagcugugauuauccacgucuuugugaaugagaaagugacauucaacggacuuacuggagaugauggaauuugug

SEQ ID NO: 392273 - RNA, 83 nt, Homo sapiens
aggaaggagcucccaacucucaacugccaguaggguuauuucucauauugcauuugagguugguugacuuaugguucuuucuu

SEQ ID NO: 392274 - RNA, 65 nt, Homo sapiens
caucccuguaacuagcagccccuggugaguagaaagugacgaugggaacugcaagaugcaggaug

SEQ ID NO: 392275 - RNA, 78 nt, Homo sapiens
uucaguuuccauguaguugagcaguuuugagugaguuccuuaauccugaguucuaguuugauuacacuguggucugag

SEQ ID NO: 392276 - RNA, 58 nt, Homo sapiens
uuaagagcauggugccagguugcucguaacugugcugauuaucugcuuaugcuuuuaa

SEQ ID NO: 392277 - RNA, 71 nt, Homo sapiens
uucuggcuaugggauacuaaaucuuccaacaacgaucugagguuuaaauuuaguuuucucguagcccagaa

SEQ ID NO: 392278 - RNA, 91 nt, Homo sapiens
cuccagccucaggccccuccgcacaggcaccgcagggcuccuccacccccggaggaucugguguccucgugggagucccuuggggcugggg

SEQ ID NO: 392279 - RNA, 77 nt, Homo sapiens
uaagggagauuuccuuugggcacuggagaugguggcuguugggccauaaucauccagccccagaagggaggaccuua

SEQ ID NO: 392280 - RNA, 56 nt, Homo sapiens
auagcagaagaagggacaauucacauucucuuguagggauguccaucuucuccugu

SEQ ID NO: 392281 - RNA, 72 nt, Homo sapiens
ggucuaguaaugucugucuuauggaccuggguauuuuuguguuaggugcauauauuuuaggguugcuggauc

SEQ ID NO: 392282 - RNA, 78 nt, Homo sapiens
aaagaaaagccuuuauuugugagacacacauauggaaauauuuauagguauguaauacaaaugaacaggguuugcuuu

SEQ ID NO: 392283 - RNA, 60 nt, Homo sapiens
auuuagggcaaggaacaguuaaaaagauuggaauucuuugacugcaucuuuacccuggau

SEQ ID NO: 392284 - RNA, 70 nt, Homo sapiens
aaugcuguucauugaugacacugauuucuucaauguucauacauguugaagugugugucagaacuuuauu

SEQ ID NO: 392285 - RNA, 56 nt, Homo sapiens
caugcuggguaaagguggugaagaugugccuuagguucacauccucucccaacaug

SEQ ID NO: 392286 - RNA, 87 nt, Homo sapiens
cacugaguauauauguuuguuuagaugguaaaucaguauugagauauacuggacuuaaugaugaauuguauauacaaauauucagug

SEQ ID NO: 392287 - RNA, 86 nt, Homo sapiens
uauggucucagaacugucauaaauugcacuggaaguaacugagcgcaugccagugugcgagaguguaauuggccuugagaacuaug

SEQ ID NO: 392288 - RNA, 81 nt, Homo sapiens
gguuuaggguacaugugcacaacaugcagguuuguuacauauguauaccuguaccauguuggugugcugcacccauuaacu

SEQ ID NO: 392289 - RNA, 58 nt, Homo sapiens
uauuuggaaacaauucacaugcuuuuucugucuuuguaggcaugugaauguucaaaua

SEQ ID NO: 392290 - RNA, 67 nt, Homo sapiens
guggggagaggagagaggacaacaacuuaaauaauaugugagaauuuuggcacucuucucuccuuau

SEQ ID NO: 392291 - RNA, 65 nt, Homo sapiens
acauggugaaaccucaucucuacuaaaaauacaaaaauuagccgggcaugauggugcacacaugu

SEQ ID NO: 392292 - RNA, 104 nt, Homo sapiens
uuaagagggacucagcagucaggggagauggcaaugcgauggugacugagugucuuagucuuuuuuguauugcuaugcaauaucugaggcuggguaauuuauaa

SEQ ID NO: 392293 - RNA, 67 nt, Homo sapiens
aggaagucucucaaaacuggaagggaaagguguuuucuccacaucaauccaguuuuggagacauucu

SEQ ID NO: 392294 - RNA, 61 nt, Homo sapiens
accaugguaugucuguccacaggaauacucuacagauuccaguggacagacauaccauggu

SEQ ID NO: 392295 - RNA, 60 nt, Homo sapiens
gaaguucuacuguggguaaaaugcuguccaauagcaccacauacuacagagauaugcuuc

SEQ ID NO: 392296 - RNA, 129 nt, Homo sapiens
ucccuccugaaauccgcuuccuguccuucuugggcuccugucugcuucuauggacuauuaauauaucucaugacacuggcaggagcuaaaaagagggguggccagaccaaagaggacacaguugaggga

SEQ ID NO: 392297 - RNA, 62 nt, Homo sapiens
aucuguucugugaaaugugucauuuugugaacacgauagagcacacuuacacgaaccuagau

SEQ ID NO: 392298 - RNA, 69 nt, Homo sapiens
ccagaggguuaaguuucaauugaaaaguaaagguucuuuuuuagaucaacauggaacucuaucuucugg

SEQ ID NO: 392299 - RNA, 56 nt, Homo sapiens
uaugacuuuugaauacagauggcugugaaaguaguuucugugguuuaaaauucaug

SEQ ID NO: 392300 - RNA, 125 nt, Homo sapiens
uauggaugcauacagccaugugcauguacagcugugugugcauauagccaugugugcguacaaccaugugugcauauggcuaugugagcauaccaccacacaagcaccaugugugugcaaccaug

SEQ ID NO: 392301 - RNA, 89 nt, Homo sapiens
cccacggcucccuuuaguggaaggagcacuggccuuggagucagacuaccuggguucaaauccaggcucugccacuaacuagcuguggg

SEQ ID NO: 392302 - RNA, 101 nt, Homo sapiens
cccagcuaaggcucacagcaccccgcuuucuggcacacuagcaaguuguuuuguaagaugcagauuugggcggggccuauuguuuggacucacaguauggg

SEQ ID NO: 392303 - RNA, 106 nt, Homo sapiens
agauuauuuaaaugcucuucaaguauaguguuuucaaaaguauguuuauaauuuuguacacauaugauguaaauauuuaugcuauuaagugugacaugaauaauuu

SEQ ID NO: 392304 - RNA, 71 nt, Homo sapiens
acuggucauggcuuuugaccugguaggaugacccaaaguuucauuccugaagagucuaggcgauuacuagu

SEQ ID NO: 392305 - RNA, 55 nt, Homo sapiens
gcccaguucaaggcugcagugagcuaugaucacgcugcugcacuuaagcaugggc

SEQ ID NO: 392306 - RNA, 85 nt, Homo sapiens
uaaguucuaggguacagugcacaaugugcagguuuguuacauagguauacaugugccauguugguuugcuguacccgucaacuug

SEQ ID NO: 392307 - RNA, 126 nt, Homo sapiens
caaaaauaaugaauugaggcauuuaaaaaagacuggaaggaaaaacaaccacagauuuugacagcuauggucuguggguguuuuuugcuuuuuauaguuuucuguguuugcaauuuuucuaaguug

SEQ ID NO: 392308 - RNA, 78 nt, Homo sapiens
ggcacaggaaugguggugcugacagccaugcagaaacagugucuauugcacaguguguacagcaccagcagcagugcc

SEQ ID NO: 392309 - RNA, 84 nt, Homo sapiens
caucgaggauccaugguauggcaguuucagcuauaguuuuugcucagggauuuauuguuggaauucuauccuggaucuauguug

SEQ ID NO: 392310 - RNA, 56 nt, Homo sapiens
auuugaguucuaccaagccuuuccacagaaggauaaagugcucugggacucuaaau

SEQ ID NO: 392311 - RNA, 60 nt, Homo sapiens
gagaaugaugauuuccaguuucauccaugucccugcaaaggacaugaacucaucauuuuu

SEQ ID NO: 392312 - RNA, 80 nt, Homo sapiens
agcauguaggguaacuucuggauguagccauggcauuuauaaacagucauggcacuaaugggaguuuacuuuaguaugcu

SEQ ID NO: 392313 - RNA, 68 nt, Homo sapiens
guguuguuuucuaguuagacuucuuuucucuauuacuuuggguuuugaggucaguaagaaugcagcac

SEQ ID NO: 392314 - RNA, 58 nt, Homo sapiens
ccucagcuccuaucucuguauggccugguuuuuccuagguuaugauuauagagcgagg

SEQ ID NO: 392315 - RNA, 90 nt, Homo sapiens
cucauugaaugcucacaaccuuaugaagcaugaauuaccccuuugcuuucagccaauggucaugccuuccauaaugugggaaagaaugag

SEQ ID NO: 392316 - RNA, 73 nt, Homo sapiens
gaggaaagaugagugagagcaucaacuucucugacaaccuaggccaguaaguagugcuugugcucaucuccuu

SEQ ID NO: 392317 - RNA, 71 nt, Homo sapiens
cacauguaaaagggcuuuguaaacuucaaguuucuguccaaauaugaaucgugauuagaggccugcaugug

SEQ ID NO: 392318 - RNA, 74 nt, Homo sapiens
auguuuuggcauaguugcacuuacuagaaaaucugaauccaaugugcuaguuuguguaacuaugcauuaaucau

SEQ ID NO: 392319 - RNA, 92 nt, Homo sapiens
guuuccuagcuagcaauuucuuggggcaauggaauaggugauugaaagaaugucuaacauucacaugcugcaaaaaugguuaacggggaaau

SEQ ID NO: 392320 - RNA, 105 nt, Homo sapiens
cucccagggccuguuaauggauuuugaacuugagaguuggcagucaaauggcccaggaugccagcugcucaguuauuagacauuuagggaagaagcaaugaggag

SEQ ID NO: 392321 - RNA, 57 nt, Homo sapiens
ggcgcaagcgauucuccaccuccgucccccaugcagcugguacuagaggcuugcgcc

SEQ ID NO: 392322 - RNA, 72 nt, Homo sapiens
caccauuauaaauugacuuauuugcuuucaaaucucacuggaaaauagcagagcaguggauuuugugaggug

SEQ ID NO: 392323 - RNA, 64 nt, Homo sapiens
uucaguuugccaguauuuuauugaggauuuuugcaucaauguucaucagggauauuggccugaa

SEQ ID NO: 392324 - RNA, 73 nt, Homo sapiens
aucuuuuauugcugaaaaugcuaaugaucaccugagccuucagggagucuuagucuuuuugcuggugaagggu

SEQ ID NO: 392325 - RNA, 70 nt, Homo sapiens
gcaacacauugcaaaagaugauggugacaguuugagcaguaaaaaccaucagguuguagaauguguuugc

SEQ ID NO: 392326 - RNA, 105 nt, Homo sapiens
augcugacuugaacucugggcucccuggcagggcuuauugacuuugagcuucauugaagugccauguggaugggcccuuuguuguggaaccccucaggucaguau

SEQ ID NO: 392327 - RNA, 94 nt, Homo sapiens
ugcucucugguucgagcaguauucccauagcuagagaggagaauacaguucuggcacugaugugggaugcuuguaaaaugcaguuagaagagcg

SEQ ID NO: 392328 - RNA, 74 nt, Homo sapiens
ucuuaacugaucaaauaugaggagaagagaaaugaucuuagaccucucuuuugggccucuugucagacuugaga

SEQ ID NO: 392329 - RNA, 78 nt, Homo sapiens
cuaggacucuuuucagaacaauucaggaggagaaacuuucuuuccuuuagacugaauccugagagaauaauagucuag

SEQ ID NO: 392330 - RNA, 70 nt, Homo sapiens
aagucuuugcuauugugaauagugccgcaauaaacauacgugugcauaugucuuuauagcagcaugauuu

SEQ ID NO: 392331 - RNA, 82 nt, Homo sapiens
uugccuucagggaauguuauuuaauagcauauuugugaucuucuagccuguugugccaaaaaauagcauucccucaaagcag

SEQ ID NO: 392332 - RNA, 68 nt, Homo sapiens
gguaacuuagcucauggcugugaaaaaccagaccgcugaccagucuuagccugugggucauaguugcc

SEQ ID NO: 392333 - RNA, 129 nt, Homo sapiens
gguagauaagcuuuuugauaugcugcuggauucgguuugccaguauuuuauugaagauuuuugcacugauguucaucagggauauuggaccaagcagaccuaauagacaucuacagaacucuccacucc

SEQ ID NO: 392334 - RNA, 84 nt, Homo sapiens
cucaggacacaccacuucaaaguaugacugcaggaggcucuugaaauauacuucuuuggcauauuuuaagcugguuauucugag

SEQ ID NO: 392335 - RNA, 79 nt, Homo sapiens
uuagagggaaaguguucagucuuuuaccauuaaguaugacauuaguuauagguauuauguagaugcucuuccccucuga

SEQ ID NO: 392336 - RNA, 99 nt, Homo sapiens
gcuguaaccuuuucagaugaugccgcugaaaaccuuaaaguacuguuguguuuucacagugcuguuguguuuucacguggucacaccucucugugcagc

SEQ ID NO: 392337 - RNA, 71 nt, Homo sapiens
uuucucaaucagguuuugucucucuuuuuugcauuaaaagcugagagaggagcuaaaacugcccugagaag

SEQ ID NO: 392338 - RNA, 129 nt, Homo sapiens
gccucccaaagugcugggauuauaggcaugagccaccaugacuggcuaugaaacaauuuuuaauacagaaauugugcuuguaggccaggcacaguagcucacaccuguaaucccaguacuuugggaggc

SEQ ID NO: 392339 - RNA, 70 nt, Homo sapiens
guccacuuguagaguaauugagaggaugaagcaagaugaugcauaucaaguacuuugcauagugccgggc

SEQ ID NO: 392340 - RNA, 57 nt, Homo sapiens
ggcuauugaugagaucucugcacuccuauuuuuauugcagcacuguucacaauagcc

SEQ ID NO: 392341 - RNA, 72 nt, Homo sapiens
gcaugagcccuauagagcugccuugccuaugcaagaggcuguccuagccugaggcaaggcaauggggugugu

SEQ ID NO: 392342 - RNA, 55 nt, Homo sapiens
uauacacgugugcauauauacauguauguuguguguguguauguguaugugugua

SEQ ID NO: 392343 - RNA, 73 nt, Homo sapiens
gggccucuucaguguuuuuccuuuaaugaggguuugauccccucaaugacagcaucaggauuggagaggaccc

SEQ ID NO: 392344 - RNA, 70 nt, Homo sapiens
guacuuuggguuaguuuuccaaucuuuggucuucuuuaaaggggagagagugggagauuuccagcagugc

SEQ ID NO: 392345 - RNA, 55 nt, Homo sapiens
aguagagguaggucuucgagucucagggacaucccuggccugcccaaugucugcu

SEQ ID NO: 392346 - RNA, 105 nt, Homo sapiens
gauuguuuugaaaugugaggacaugggacuuggggguggccaagggugaaaugauaugguuuggcucugugucccacccaaauuucaccuugaauuuuaauaauc

SEQ ID NO: 392347 - RNA, 108 nt, Homo sapiens
cucacucagauggcuguuggcaagaggugcuguacaccagagaggccucuuuccagggcguucacagcauagcaguggauuucugccagagcaggugaucccagugag

SEQ ID NO: 392348 - RNA, 73 nt, Homo sapiens
cgguagagccauugagguagcuuugauggaggucaguguacuuguggccuucauaggagcuauuugcugauug

SEQ ID NO: 392349 - RNA, 57 nt, Homo sapiens
gaaggcaugcugcauggccagacagcugugguccaagugacaugcaaggcugccuuu

SEQ ID NO: 392350 - RNA, 73 nt, Homo sapiens
cgaagcuggauuuaguguggagcaaaauuucauauacaugcuugcacugcugcacacuauguuuacuguuuug

SEQ ID NO: 392351 - RNA, 67 nt, Homo sapiens
uugacuagugcccucagaccuagaacacucuagcccauaauguucucuguucauggcacuaugucag

SEQ ID NO: 392352 - RNA, 109 nt, Homo sapiens
uuuguuuugcacugcuucacucuacaaccuguuggggugaaucauacuuuguuauuaauugcucugaggcacucccuagcgggguggagcauuuggaguccugaauaaa

SEQ ID NO: 392353 - RNA, 107 nt, Homo sapiens
gaguguguguguguacauuugaauuucccauaaagguguuuuuuauuagauaggguguagcuuuguacuagucauauuuugaaauucagaucugcucauauacacuc

SEQ ID NO: 392354 - RNA, 77 nt, Homo sapiens
gcuggcaaaugugguguuugagcugccagggaucaucagggucucucugcagcccgggacacugcauauauucuagc

SEQ ID NO: 392355 - RNA, 62 nt, Homo sapiens
ggggcauugugacauaucucugggccuacacccagguuauaugacugucaugccugugcccc

SEQ ID NO: 392356 - RNA, 64 nt, Homo sapiens
acugugaauagugcugcaauaaacauacgugugcaugugucuuuauagaagcaugauuuauagu

SEQ ID NO: 392357 - RNA, 72 nt, Homo sapiens
cagauaaaguuuauuggcaccaccauguccuccuucccugggcugugaguggacgugaccaauaaacugcug

SEQ ID NO: 392358 - RNA, 65 nt, Homo sapiens
acaaugaacacacaaggaauucucguccagacaaagaugaauggauucaucuguuuguucgcugu

SEQ ID NO: 392359 - RNA, 92 nt, Homo sapiens
ccguccaaccacccauccagugagcauugguugaacagauuguguugaaugcaacaauggaauaaugucaccagguuuaugggugaugaugg

SEQ ID NO: 392360 - RNA, 68 nt, Homo sapiens
acagcugacaaagccugaaugugacagggcaagacauuuuaggcagcccucauggcuuuuucagcugu

SEQ ID NO: 392361 - RNA, 86 nt, Homo sapiens
gcuuucuacuucuaguaguuaaagucggucacuugcagauguuuuccauuggugacuauugauuuagacgugcugagagagugagc

SEQ ID NO: 392362 - RNA, 83 nt, Homo sapiens
ggucuauuuagguuuuggauuucuucaugguucauucuugguaaguugaaugcaucuagaaauuuauucauuucuucuagauc

SEQ ID NO: 392363 - RNA, 81 nt, Homo sapiens
aacucgugguaaaauggcauagagcuacacacacacauugcaccaaugucaauuuccugguuuugauauuauacuacaguu

SEQ ID NO: 392364 - RNA, 129 nt, Homo sapiens
ccuccacuccccuuuccagagggggccaugguuaacaguguguguguucaccuagaccguuuaugcaucuguagacacacacacagugaagugugguuuucgucguuuugguggggagguugguuucug

SEQ ID NO: 392365 - RNA, 96 nt, Homo sapiens
ucugaguuuacaagugcuguuuccuugagaaaguacaaggcuguauuuuucuucacauauagcugcauuucagugaaauauuucuuggccuucaga

SEQ ID NO: 392366 - RNA, 112 nt, Homo sapiens
agugcugaugaugcaacaaguaauuaacuuucugugacgcaaagcugggaaggcagcuguggcuauuuuccaguuguucuagaaagcuagcgccuaggccuuugucagcgcu

SEQ ID NO: 392367 - RNA, 69 nt, Homo sapiens
guuuugugagguguuuaagcauaggaucugccaaucucuucagccuugugcuucaucaccuagcagaac

SEQ ID NO: 392368 - RNA, 94 nt, Homo sapiens
gauuacauagaaauguuaaaguuuacagugcacauggguugggccaaagaaagugcuugacacaugugcguagacucuuuauugacugcggauc

SEQ ID NO: 392369 - RNA, 60 nt, Homo sapiens
gaaccuccgccuagauuucagaggauguauggaaaugccugaauguccaggcagagguuu

SEQ ID NO: 392370 - RNA, 93 nt, Homo sapiens
uaggggguguuaacuggguacccuuuaaacaggaaaguccccaugaugucauuucuggauuaaaagguaugcauauguaauugacauuucuug

SEQ ID NO: 392371 - RNA, 58 nt, Homo sapiens
gcuucuguggcucagggguguggacucacauucgccucugcaccccuaccucagaagc

SEQ ID NO: 392372 - RNA, 107 nt, Homo sapiens
cauggcuuguaucucugccaaccaagccaugaccacagguguugguuugauugcuucuggccagugugaugugaucauggcagguggugucgaguugauguuccaug

SEQ ID NO: 392373 - RNA, 67 nt, Homo sapiens
ucccagugcuaugcaaaagccugacagugaugacuaaaaagcuacaggcugucacguaacacugggg

SEQ ID NO: 392374 - RNA, 76 nt, Homo sapiens
auuuauuuugaccauggggcaggagaaaccugggaaggugggaggaagguuggaaagcaacauggccagagugaau

SEQ ID NO: 392375 - RNA, 79 nt, Homo sapiens
agcugcaggugcauuguuuagaaacacuggguucugagaguuccagcccugcugauuuugagauaauguauugccagcu

SEQ ID NO: 392376 - RNA, 84 nt, Homo sapiens
agaucauccuuucauuccucuagugacaaauuucaugaugcgaaaaaugauguguuucaugagacacacuggaaaggaaaaucu

SEQ ID NO: 392377 - RNA, 81 nt, Homo sapiens
uaaggugacuaaagugaggauggcaguagguuuggauuccuuauuuacuuacuucuaguuugucacuucucagucaccuug

SEQ ID NO: 392378 - RNA, 61 nt, Homo sapiens
uggagauguuuaaaauccacugagauagaaaaguauaccagaggguuugaaacauauucua

SEQ ID NO: 392379 - RNA, 64 nt, Homo sapiens
ccuaccucuuuguaauaagaauugaggcaaauuugucaucaaaugcucuuugcagagagguagg

SEQ ID NO: 392380 - RNA, 75 nt, Homo sapiens
ccccuggcccauucauaaguaaaugauuaccuaauugugagguugggaauggaagacauuaugauggggcagggg

SEQ ID NO: 392381 - RNA, 104 nt, Homo sapiens
auauaccuaaguaugggacaauuauaugaaacugccaguauucaacuggcauugaccuacaaauggcaguuuggcaguuucauaaaguucaaacuaagauaugu

SEQ ID NO: 392382 - RNA, 70 nt, Homo sapiens
gcuucuccacuguacucaucccauaugcacuuguaauuaagaaguguuuugugaggagguacuuugaagc

SEQ ID NO: 392383 - RNA, 83 nt, Homo sapiens
ugauacguuuugaguagaggaggaacuugauucugauuuaacauuuuauagaucacucagguuucucccuggggacuagauua

SEQ ID NO: 392384 - RNA, 76 nt, Homo sapiens
ggugccaaaguaauugugguuuugccaugacuuuuaaugguaaaaauugcaauuauuuuuaucaucauuuugcacc

SEQ ID NO: 392385 - RNA, 71 nt, Homo sapiens
uccugcuacuuuaaacagugaugcaccgaauaucuuuauaacuuugcauauguucaaaguauucuguagga

SEQ ID NO: 392386 - RNA, 60 nt, Homo sapiens
uuugcugaauagucaauguuggauuguucuuccuuacgagcacuaauacuauucaacaag

SEQ ID NO: 392387 - RNA, 78 nt, Homo sapiens
gauagagggucauuaagcagcuuugcauggccugugagacagucucagcccugccagagcucucaacagccaccuguc

SEQ ID NO: 392388 - RNA, 75 nt, Homo sapiens
cuuaaaaugugccuacuggagcuugcagugagccaagaucgugccacugcaauccagccugggcgacagagcaag

SEQ ID NO: 392389 - RNA, 56 nt, Homo sapiens
auaguaaacauaguucuuuugcucuaaaucuagagcaauuguggguauguuucugu

SEQ ID NO: 392390 - RNA, 102 nt, Homo sapiens
gaguuucuaccuauugugguuuuuaaaguaccugugguccaggggcaguggcucacaccuguaaucccaggacuuugggaggccaaggugggcggaucacuu

SEQ ID NO: 392391 - RNA, 88 nt, Homo sapiens
ggagaauugcuugaaccugggaggcggggguugcagugagccgagauugugccacugcacucccgccugggugacagagcaagacucc

SEQ ID NO: 392392 - RNA, 128 nt, Homo sapiens
auuuccucuuuugauugguuacuuuuauggagagauauuuaugguuuuaauaagauuucccucccaucuguuuugauccuaccguaaaaucaucccauguuugaugggcagccgguuguuagggaaau

SEQ ID NO: 392393 - RNA, 81 nt, Homo sapiens
guggggaacuuuugugucuaucucagggauuguaaaggcaccaaucagcacccugucaaaauagaccaaucagcucucugu

SEQ ID NO: 392394 - RNA, 71 nt, Homo sapiens
ggauuugguuugccaguauuuuacugaggauuuucacuuugauguucaucaggaauauuggccuaaaauuc

SEQ ID NO: 392395 - RNA, 74 nt, Homo sapiens
agccuuaaguagugugcauguauguaugugcacacguguacauguaugccuguuugcgcauugagagcuaggcu

SEQ ID NO: 392396 - RNA, 70 nt, Homo sapiens
gacugguauggcauuuguggauuggccaauuuucccuugaauugcccaaacuucuguguuaauaucaguc

SEQ ID NO: 392397 - RNA, 74 nt, Homo sapiens
uagguuaaacacuuauaggccaacuacagcaaaguuuccagaacuguauggcauguauuuuguguauuaacuua

SEQ ID NO: 392398 - RNA, 58 nt, Homo sapiens
uagcaguaaagaaugugauguugucagaggaaggaagguguugaauuuuuugcuguug

SEQ ID NO: 392399 - RNA, 86 nt, Homo sapiens
guuguucaguuuccguguaguugagcaguuuugagugaguuucuuaauccugaguucuaguuugauugcacugugaucugagagac

SEQ ID NO: 392400 - RNA, 73 nt, Homo sapiens
uuugguguguaaaugacucauuuuggguaauucuguaaaggccaccuaugaaugugagucauuaguaaccaaa

SEQ ID NO: 392401 - RNA, 68 nt, Homo sapiens
ugugaaugugcacauucugguaaauauuccuuugggcuaauagugacacaggugugugcacaggugca

SEQ ID NO: 392402 - RNA, 78 nt, Homo sapiens
cccuaucacugaccucuugucggagcuccagauauauccuguugucugcuggagaucuugacauugaagucuaugggg

SEQ ID NO: 392403 - RNA, 59 nt, Homo sapiens
uauuagguuggugcaaaaguaacugugguuuuugccauuacuguugcaccaaccuaaua

SEQ ID NO: 392404 - RNA, 79 nt, Homo sapiens
aauauguaugugaggucacuuguuuuaugcuuccaguguacuuucaggagcauaaaacaugugaccugauguacauauu

SEQ ID NO: 392405 - RNA, 57 nt, Homo sapiens
aaagcugugaaauggagaaaauggggaagcugaccauuuugcacacuaugcagcuuu

SEQ ID NO: 392406 - RNA, 101 nt, Homo sapiens
gagcaccccgggaaaggauaaggcuguucauuuagcacagugccugcaacauggugagcacugggcagaugaccaccguuaucuguguuaaucugguguuu

SEQ ID NO: 392407 - RNA, 65 nt, Homo sapiens
gguaaugguaagauaguauguuuaacccaggccugccuggcacauagaacuauuuuccuuuuauu

SEQ ID NO: 392408 - RNA, 63 nt, Homo sapiens
uaguaaaacaaagaagaagguguaaguggaacuauauuagagcaaaguuucuauguuuuacua

SEQ ID NO: 392409 - RNA, 76 nt, Homo sapiens
ucacuugaagccaggaggcagaguuugcagugagcccagauggugccacugcacuccagccuuggcaacagaguga

SEQ ID NO: 392410 - RNA, 106 nt, Homo sapiens
ucuguuagacagcugguagaguacauuuucuuaaauauuugcaggacauagccauguguuaguuguucauguuaagaguagccugugccacuguuuccuagacaga

SEQ ID NO: 392411 - RNA, 57 nt, Homo sapiens
gugggguaggaggaguacuuccuuaagccuacuugcuaaagucacccccugcccuau

SEQ ID NO: 392412 - RNA, 67 nt, Homo sapiens
guaaggagcaaugccucauucucacugaagagagacucacuguggauuuugcuuugcucuucuuugc

SEQ ID NO: 392413 - RNA, 76 nt, Homo sapiens
uugcuugaacaugggagguggagguugcagugagcugagaucaugccacuguccuccugccuaggugacagagcaa

SEQ ID NO: 392414 - RNA, 68 nt, Homo sapiens
uuguauggucugugucacaacuacucaaauccacgggugcagugcaaaagugagcacagacaauacaa

SEQ ID NO: 392415 - RNA, 83 nt, Homo sapiens
uggagaaauaagcauagcagcauauguaauguugaaacuggucuacuuacuugaauauucaucugcucuaaauuuagacucua

SEQ ID NO: 392416 - RNA, 122 nt, Homo sapiens
caggaagaauaaauggauggggaacagauuaacugguaaauaguucucuuuggaauuugaauacauuugagagacagacauuaucuuauauaagagucuguucuugugugguuaaauucuug

SEQ ID NO: 392417 - RNA, 61 nt, Homo sapiens
ggccuaacaguauugcuuuuaacccaaucucuuuuauaugaaagaaggcagaauugaggcu

SEQ ID NO: 392418 - RNA, 66 nt, Homo sapiens
ggcaaaggcagcaugaaggcuuguucagaucaaaagcuaaaagguguucuucauugcuguuuugcu

SEQ ID NO: 392419 - RNA, 87 nt, Homo sapiens
cuucauauggguucuuauguccuuuggacacaguuccuuaauuuugagcaguuguuuuaugacauaagauauuccaugcucaugagg

SEQ ID NO: 392420 - RNA, 60 nt, Homo sapiens
ccugucacuguggagaagaaaguggggcugauccuccccuugacuccagggugacccagg

SEQ ID NO: 392421 - RNA, 61 nt, Homo sapiens
ucuugauauguagguggcaagcauaucaauuccugauauguagcuugucuacauaucaaga

SEQ ID NO: 392422 - RNA, 67 nt, Homo sapiens
aagcagggaaucauaugcucccuuucugagaucccaauuuuuuaguuuguauuugacuuucuuguuu

SEQ ID NO: 392423 - RNA, 99 nt, Homo sapiens
caagaacaggccauuuucacuucuuuugugauucuucaguuacuucaggccaucuggauguauacgugcaggucacaggggauaugauggcuuagcuug

SEQ ID NO: 392424 - RNA, 65 nt, Homo sapiens
gccucuagcucccaggcuuaggugauccucccaccucaaucuccugaguagcuagaacuaggggc

SEQ ID NO: 392425 - RNA, 77 nt, Homo sapiens
auaucuucagguaaaaaguagaaugaagcauucucagaaacuucuuugagaugugugcauucaacucacagagaugu

SEQ ID NO: 392426 - RNA, 129 nt, Homo sapiens
auccauucuacuguuaauaggcauuuagguugauuccauguuuuugcuauugugaauagguauugcaguacuauucacaauagccaagauuuggaagcaaccuaagcauccaucaacagauuauuggau

SEQ ID NO: 392427 - RNA, 97 nt, Homo sapiens
cacaggccaaagaaacaggccccagauggagucccguggaguucugccaucucuuuggcugagcugaauugcugccauuugccugcaucugucagug

SEQ ID NO: 392428 - RNA, 78 nt, Homo sapiens
guuuggaaaccuuguagccacagguggcuaggaaauuuaagagugcuuggguggcuugauggcacaagguuucugaau

SEQ ID NO: 392429 - RNA, 60 nt, Homo sapiens
ggcugagggacauauaugaggugugauuuuuuagugucauaugguguuugcuauucagcu

SEQ ID NO: 392430 - RNA, 81 nt, Homo sapiens
gguugcuuaagccuggagguugaggucgcagugaacugugauuacaucacuggacucuagccugggugacaaagugagacc

SEQ ID NO: 392431 - RNA, 77 nt, Homo sapiens
ucaucaaaugucaaagguaggcaguaucacuugggaaguccaagucacagccuuuuacuuuagagaugaaaagaugg

SEQ ID NO: 392432 - RNA, 72 nt, Homo sapiens
uaaucagucuaauagcauuuauuggcugcuuaccaaguucuggacacugaucuaagugcuuuauauugauua

SEQ ID NO: 392433 - RNA, 70 nt, Homo sapiens
auacuagaaaagguuuugauccucuuucugaaaacaagauggucucaggaauggaaacuuuugaugguau

SEQ ID NO: 392434 - RNA, 58 nt, Homo sapiens
uggcuagaccugcauaacagcuaccgcuuuaaaggggagccuguuguccaguuugcca

SEQ ID NO: 392435 - RNA, 82 nt, Homo sapiens
gguacuuagggauccugggacuccagguaccacucuacacaccugcuccagguacuuagagauuccaggaacuccagguacc

SEQ ID NO: 392436 - RNA, 82 nt, Homo sapiens
aauguaucaugauuuugcacuauaggaaaaugugucuugcugagauguacaauauuucuaaguguauucuguccauugcauu

SEQ ID NO: 392437 - RNA, 78 nt, Homo sapiens
uuguguuaagcuauauugaggaugccauucaauaauuacuuuaaaaugcauggcgacuucaaauaugaaggaacacaa

SEQ ID NO: 392438 - RNA, 120 nt, Homo sapiens
aacaacaaugauaauauaggaacgaaaacagaacuuguagauuugcccaaauuaacucuguuucuccaaauuugagguguauggcaaguugaacguuuguucucucugcaauuguuaguu

SEQ ID NO: 392439 - RNA, 129 nt, Homo sapiens
ugacgugcaaggcuugacugaugaauaaaagccuuaccacagucauuacacuuguaagguuucucuccaguaugaagucuaugaugacgugaaaggugugauuguugauuaaaagccuugccacauuca

SEQ ID NO: 392440 - RNA, 55 nt, Homo sapiens
acucuaacagccaagacaugaaaauauucuaauuuucuuugcucaguguuagagu

SEQ ID NO: 392441 - RNA, 90 nt, Homo sapiens
agaacagugccuggcauauaguaggugcucuguguuugauaaauuuauucaacauuuauugagcaccuacuggaugccagaugcgguucu

SEQ ID NO: 392442 - RNA, 66 nt, Homo sapiens
cacagaauaacgugucucucagggucguuuaaauuccaaagagaacuguuuacacguuaaucugug

SEQ ID NO: 392443 - RNA, 63 nt, Homo sapiens
acacacugaaguauuuuagugugaaacauuaggugucagaaauguuaagguacuuagaugugu

SEQ ID NO: 392444 - RNA, 90 nt, Homo sapiens
cuuuaaacagcuuuacugagguacaauuuauauauuauaacuuucacccuauguaagugugcaauucagugaucuuugguaaauuuagag

SEQ ID NO: 392445 - RNA, 59 nt, Homo sapiens
ugucuuaauauggaguuacucagaugaaguuaaaucuguguaaguccugaguuuggaua

SEQ ID NO: 392446 - RNA, 59 nt, Homo sapiens
guagcagucacauagcagauugaauuaagguuuguauuagucuguucuuacacuguuau

SEQ ID NO: 392447 - RNA, 74 nt, Homo sapiens
cuggauauuucccauuucccccaaaugcagccugguaaccacuguauuuguuguuaaauggagaggauuucuag

SEQ ID NO: 392448 - RNA, 68 nt, Homo sapiens
ugagaucuuaucagaaauggugucagauuuugucaaauguuuuuucugcaucuauugagaagaucuua

SEQ ID NO: 392449 - RNA, 59 nt, Homo sapiens
cugaugaugauguucacaaugaugaugauuacuauagccuugugagcauuagcauuuag

SEQ ID NO: 392450 - RNA, 62 nt, Homo sapiens
uuauggcaaaugaaagaaagccagucucagaaggcgaugggcugggugauucauuuccauaa

SEQ ID NO: 392451 - RNA, 64 nt, Homo sapiens
aaaccaugccuggcuucauguagauacacugagauguaggugucaugaaggcaggugugaguuu

SEQ ID NO: 392452 - RNA, 66 nt, Homo sapiens
cucuccugcucuuggaucacuuucucuguuugaaagaaucccugugacgagcaucccuauggagag

SEQ ID NO: 392453 - RNA, 59 nt, Homo sapiens
gcuuagcaaacugagagccacuaucuauuuuacagagcauggcucuuugcugcuaaagu

SEQ ID NO: 392454 - RNA, 63 nt, Homo sapiens
uggagagcaugugcuggcaucaguagagaaaauuugauacuuuaacaugcauuauguuuuuca

SEQ ID NO: 392455 - RNA, 58 nt, Homo sapiens
ugagacggagucucgcucugucacccagacuggagugcaguggcgcgaucuccgcuca

SEQ ID NO: 392456 - RNA, 69 nt, Homo sapiens
cuacuguugugcgcgcuugggcuaucuucaaguccugccuauuucaaaugguccacgugaacauuguag

SEQ ID NO: 392457 - RNA, 67 nt, Homo sapiens
gcaugucauguuucuacugaccaaauucugggagucuccccuuuggguaaaaacauaacacucuugc

SEQ ID NO: 392458 - RNA, 60 nt, Homo sapiens
acugagucuuaggguaccaaacugacuugccucauauauguggaaucugaagaucucagu

SEQ ID NO: 392459 - RNA, 73 nt, Homo sapiens
gacaugagauuuggguggggaugcagagcugaaccauaucauuaugccucuggccccucccaaaucucauguc

SEQ ID NO: 392460 - RNA, 64 nt, Homo sapiens
caggugcauuggcugacaccuguaauccuagcacuuuaggaggccaaggugggcgaaucaccug

SEQ ID NO: 392461 - RNA, 58 nt, Homo sapiens
gaagugggagugacugaggcucaauuuaccccugugcgguuucacacucgccuacuuc

SEQ ID NO: 392462 - RNA, 103 nt, Homo sapiens
ucugucuccuuugguccagagccuuugugggacagcuguaggaggaggcccuggguacugcaguaggcccagcgggaggcaucuggucaaggaagagaacaga

SEQ ID NO: 392463 - RNA, 85 nt, Homo sapiens
uggaguuuaccagaaauauuagcaaguccauauccauuugauauaaucaggaacugagauuguucuaugucugguuuccauucca

SEQ ID NO: 392464 - RNA, 82 nt, Homo sapiens
uuuugaaauguuuuguucuugaguugggaguacaaaguguccagcacuugguauucuuauccaggaaugagcauuuacaaaa

SEQ ID NO: 392465 - RNA, 68 nt, Homo sapiens
gcugaagcagauccagguguggcagggcgugacauuuggcccaggucagugucuggauccugcucagu

SEQ ID NO: 392466 - RNA, 63 nt, Homo sapiens
ucaucuuaacgagaugaaugguguaucaaagaaacuaugacuacacacaauuugucaagguga

SEQ ID NO: 392467 - RNA, 56 nt, Homo sapiens
guucuuucuguugugucuucaggguguugauuugagugugacuuagcagaaggagc

SEQ ID NO: 392468 - RNA, 60 nt, Homo sapiens
uaagugaaggaaguguguuuacaaaugucauuuuugucugauuucacuuaccuucauuua

SEQ ID NO: 392469 - RNA, 88 nt, Homo sapiens
cugagaacuagucacacuuuguuuaaugauaugcugcacaaaccuuuggauccagauuugagcauguaguuuaacccuggcuaaucag

SEQ ID NO: 392470 - RNA, 69 nt, Homo sapiens
ucagcagugacccaguguugggcagaacuguggagccccaauuucugcugagcacugggccugugcugg

SEQ ID NO: 392471 - RNA, 65 nt, Homo sapiens
uagacuggaugaaaguucccagaugccagagaacauuuagcacugggccacauuuauuuucucua

SEQ ID NO: 392472 - RNA, 74 nt, Homo sapiens
ggccacccucugcaggacugaggccuguuuguucucaucaguaaccaaacauugaccucauccuggcacuggcu

SEQ ID NO: 392473 - RNA, 64 nt, Homo sapiens
gcaacucugucuccuucaaguucaccggccucacgccaguagccgggacagagacaggaucugu

SEQ ID NO: 392474 - RNA, 62 nt, Homo sapiens
ggaguauucccugguuaaggaaagguuuacuaaagagaacuuccugagagaggaguaacucu

SEQ ID NO: 392475 - RNA, 80 nt, Homo sapiens
ggcugcggagccuagcagacucaggccugugggaaugggauuuguuacaaaucuagguuuguuacuggcuucagaaagcu

SEQ ID NO: 392476 - RNA, 64 nt, Homo sapiens
ucuaucccagauaauguucugugugcacuugagaaaaauuuguaggcuguuguuuugggaugga

SEQ ID NO: 392477 - RNA, 72 nt, Homo sapiens
acauccucuccagcaccuguuguuuccugacuuuuuaaugaucaccauucuaacuggugugagaugguaugu

SEQ ID NO: 392478 - RNA, 66 nt, Homo sapiens
agugggcuugacugaaauaguucauuuaggaugagaacuuuguguauaguugagucaaguuucacu

SEQ ID NO: 392479 - RNA, 61 nt, Homo sapiens
cugcuucucaauaccaugugaauuaguuaaauuacauggcaauugggaaauaaaguugcag

SEQ ID NO: 392480 - RNA, 130 nt, Homo sapiens
cuaacucaggacuuguccuuauggugguggcagggauucaacgagagagcaggagugcacacagcuauuagagucuuagguuuaaucacuucuaccacauuccaugggccaaagaaaaucacuaagauag

SEQ ID NO: 392481 - RNA, 120 nt, Homo sapiens
cauuauuaucucuaucugacauauaaggaaacuggaucccuuaaaguuaaguuaccuguccuggaugacauagcuauuaagugaugccaagucuccuuuauuuuagauguguauauaaug

SEQ ID NO: 392482 - RNA, 74 nt, Homo sapiens
ucucguaaguugguuuccuguaacuggacauaugcaaaaguaugcuaguuucaaauaaccaaaaguaaaugaga

SEQ ID NO: 392483 - RNA, 125 nt, Homo sapiens
cuucggccucccaaaaugcugggauuacaggagugaguuacugcacccaucaucuguucuuuuaaaaauccauggccgggugcgguggcucacaccuguaaucccagcacuuugggaggccgagg

SEQ ID NO: 392484 - RNA, 67 nt, Homo sapiens
augucugaguggggaacaagccaugcacauccaggaguugagaaguuuggcccccagcucaggacau

SEQ ID NO: 392485 - RNA, 55 nt, Homo sapiens
ccuaugugugucuuugcauguaaguugagucucuugaaugcagcacacugauggg

SEQ ID NO: 392486 - RNA, 76 nt, Homo sapiens
ccagagucugguguucucacacuaguuggcacauagcugaagcuccuauuauguguguggauacacagagagcugg

SEQ ID NO: 392487 - RNA, 62 nt, Homo sapiens
ggguuggaagggcacaaauggcuugcuuccacucauagccaagccaguguuccuuguggcuc

SEQ ID NO: 392488 - RNA, 68 nt, Homo sapiens
gcuuuggguuucuaauaugcucuaagucaacacuaggauuguguugaucuguguuagaagcuaagagc

SEQ ID NO: 392489 - RNA, 95 nt, Homo sapiens
gcuuucugggcaggcagugagugaaugagaucccuggcaccuuggagugagaucagagucuagaucacucacuggggcccuguuucccaggaagc

SEQ ID NO: 392490 - RNA, 72 nt, Homo sapiens
cagcacuugggaggggccacaugcagugugugccgaaguugugcacgugcucauuugaggucuuaccaguug

SEQ ID NO: 392491 - RNA, 56 nt, Homo sapiens
gucuggaccaagugcucacucacccuucuucuugguuuggcacuugacguccggau

SEQ ID NO: 392492 - RNA, 95 nt, Homo sapiens
augaauggugaaaguguauguaguauaugcuucugacacagucuuuggagagcugauucaaagucuucucaaguaacauauagcuucccaaucgu

SEQ ID NO: 392493 - RNA, 66 nt, Homo sapiens
ggguauugucaccaucccuguuuuauacauaaggacagugguaaggcucagagaggugaaguaccc

SEQ ID NO: 392494 - RNA, 61 nt, Homo sapiens
cauauguagaagauugaagcuaggaucaaucaauugaagcuaggauuaauuuucauauaug

SEQ ID NO: 392495 - RNA, 94 nt, Homo sapiens
caugaggaaauagaaguugagagaguuuguaauuugcuccaugcuacacaguugguaacuggcauagccagacuucucacucauguuuucucug

SEQ ID NO: 392496 - RNA, 96 nt, Homo sapiens
auguuaaguaugugagguaaugaauauguuaauuagcaucauuuagucauuccacgauguaugcauaguucaacauauaucacauaugauaaauau

SEQ ID NO: 392497 - RNA, 56 nt, Homo sapiens
ugcauggaggagcuccccgcagggucuucugucugggggcagagcuucuccaugca

SEQ ID NO: 392498 - RNA, 63 nt, Homo sapiens
uuuggcauuagauaauuguguacuaaaaugggauaccacugcacaccuaucagaauguccaaa

SEQ ID NO: 392499 - RNA, 58 nt, Homo sapiens
uguccagggauggggucagggacggguuuggcuguugccuagaugcugcccugggaca

SEQ ID NO: 392500 - RNA, 59 nt, Homo sapiens
gagguggagagccagagugcggacuugccugauugagcucucacuuggcuuugccccuc

SEQ ID NO: 392501 - RNA, 77 nt, Homo sapiens
uuacaagaucagugguuuucucaguucagcagugcauggucuaguguugaauaggugaagcacaagagauuuuguag

SEQ ID NO: 392502 - RNA, 71 nt, Homo sapiens
auccuaaaccauaucacacuccaaacagaagcugccauaacuggcaaaacggcaagugugagguuuggggu

SEQ ID NO: 392503 - RNA, 71 nt, Homo sapiens
gaugacauugaaaagcaaguggacuuaaauugcauaaucagaacuuauauucauagcuuuuuggucucauc

SEQ ID NO: 392504 - RNA, 81 nt, Homo sapiens
cagaaugugaagugaagcaguagugugggaacccuuuuaauaaggaaagguauacccugcuauuccucauuuaagguuuug

SEQ ID NO: 392505 - RNA, 60 nt, Homo sapiens
ugcugggauuacaggcaugagccacugugccuggcugcauugucccucuuaaucccagca

SEQ ID NO: 392506 - RNA, 69 nt, Homo sapiens
ggugaaaagaugagcaccauacacagcagccuggccauuggucauguguauggugcuaaucuuuucacc

SEQ ID NO: 392507 - RNA, 84 nt, Homo sapiens
cauaauggcucauuugcaauagcuucaggagaaggggggguuucuugaaacaucuuuuuccauggauuauuauggcucauugug

SEQ ID NO: 392508 - RNA, 60 nt, Homo sapiens
guucauugagauuauuguguuccuuuaguuuuuuuaggugaaaaaaugauuuuagugaau

SEQ ID NO: 392509 - RNA, 104 nt, Homo sapiens
aagauuucuccccuccuugaugugccagaaacaucaucucuccauuaaaauuuacaaaacggagagaugauguuucuggcacaugaagggcggagagaagucuu

SEQ ID NO: 392510 - RNA, 84 nt, Homo sapiens
uucgcccuucuucuugguaaugucacauuuccuguacccucaggcuaucgaggaagccuggcauuaaaaagcaaaaagagugaa

SEQ ID NO: 392511 - RNA, 72 nt, Homo sapiens
ggacauuauacuaagugaaguaagccaggcacaagaagacaaauauucugugauuccacuuauaugaggucc

SEQ ID NO: 392512 - RNA, 63 nt, Homo sapiens
ucagugugguacaaagcuggagagaaaaagaacaaguguaucucugcuuaaugucccacuuga

SEQ ID NO: 392513 - RNA, 68 nt, Homo sapiens
uuccuucuccccuucuaggacuucggucuccucuucccuuagacugagcccauucuggggagaaggaa

SEQ ID NO: 392514 - RNA, 65 nt, Homo sapiens
caaccaaucagauguuuguauaggaguaugaccuuugucauuuuacuucagccucugauugguug

SEQ ID NO: 392515 - RNA, 67 nt, Homo sapiens
gugacuggacucugaagaaaauugaaggccugagcuccgaacagcugccauuuucucucuccaucac

SEQ ID NO: 392516 - RNA, 59 nt, Homo sapiens
agcaagaaugaacucucccagagccucuuaccagccgcauuuggaagccaugucuugcu

SEQ ID NO: 392517 - RNA, 129 nt, Homo sapiens
caaaacgaugagguugaguguguguguguguaaccuagaaucuaggucuucuuagauugaaaaucaucgcaguucuaaggaacucugauaucuggaaaaauccauacucaggcaccaaucagucauuug

SEQ ID NO: 392518 - RNA, 58 nt, Homo sapiens
ugggaucaugagcaccgcuuccuucaccaguuuccuggaguaggugcucaagaugcca

SEQ ID NO: 392519 - RNA, 93 nt, Homo sapiens
gaugugaggcuugcuggugagaacauggagaaccccccaauacccaugaguacugggaauguuggccauguuuugaacuaguuucuuuucauc

SEQ ID NO: 392520 - RNA, 57 nt, Homo sapiens
uuuggcuuugagaagcaguggagcuggggcaucagaauccagugaggcaaaguggga

SEQ ID NO: 392521 - RNA, 79 nt, Homo sapiens
gucuuuacacacaaaguagauuagucuuccacuugaaacugcccaauggaagaauuucuuuuucugauguuuugaagac

SEQ ID NO: 392522 - RNA, 69 nt, Homo sapiens
gauaguuacauauagauguauguguagauauguggguuauuagacacacauacauuuaucugcucuguc

SEQ ID NO: 392523 - RNA, 57 nt, Homo sapiens
uguucaugugagucuguauuaacuagugguaaaccaguuuuaaauuucacauggaua

SEQ ID NO: 392524 - RNA, 91 nt, Homo sapiens
gggggccccauauuuacauuucauacuaaggcucaaaaaucauguagcugguuuugcucuugguaaugaaagacuccuugaggugguuccc

SEQ ID NO: 392525 - RNA, 87 nt, Homo sapiens
gcgacugggauccuaaguguaugaaacaguccauggcauacccauggguguccuguggugccucuauacauuggcuuuccuaguugc

SEQ ID NO: 392526 - RNA, 93 nt, Homo sapiens
gggauuacaggcaugagcuacuacacccagcuuggguuuuuaagauuaaauauaugacuucagccaggcgugguggcucacgccuguaauccc

SEQ ID NO: 392527 - RNA, 59 nt, Homo sapiens
cucuauagauuugccuauucuagacacuucauauaaauggaagcaugcaaucugugggg

SEQ ID NO: 392528 - RNA, 116 nt, Homo sapiens
uugaucauugagcuuucugcagguggauaaguuugucacuggaucacuaauguugugcuguuauugcuccagaggcugauuuuauuguucaguccaucaaaagaggcugugguuaa

SEQ ID NO: 392529 - RNA, 76 nt, Homo sapiens
cucaccuucuguguugaugcucauuaauuuucccagucaugagauaaugagcucagauaacaccuuagacaaugag

SEQ ID NO: 392530 - RNA, 63 nt, Homo sapiens
ucaaaagcuguuguucauccugaauugaauuuucuuaguuuggguggaacagagucguuuuga

SEQ ID NO: 392531 - RNA, 82 nt, Homo sapiens
cuugaacacauuaugcuaagugaaauaagccagacauaaaaaugacaaauauuguauuauuccacuuacaugagguaucaag

SEQ ID NO: 392532 - RNA, 68 nt, Homo sapiens
ccucaacucuaccuuaucccuaacuucccauuucaaauggaagggaauggggaucaaggaguagaagg

SEQ ID NO: 392533 - RNA, 77 nt, Homo sapiens
ugaaggaucuaaaugguuacaaugcuuugcuuuugaaaacauugagugcaucguggccauuuuaaaagauugcuuca

SEQ ID NO: 392534 - RNA, 56 nt, Homo sapiens
uuggagagagaggacucccggcccuacccaggccucgugggaguuucugucuccaa

SEQ ID NO: 392535 - RNA, 60 nt, Homo sapiens
uguaaauagugcugcaauaaacaugcaugugcaugugucuuuagaguaguaugauuuaua

SEQ ID NO: 392536 - RNA, 67 nt, Homo sapiens
uguuuaggguuuaaauuagacaucauacauuauguguaugauagguuuagguuuagacauaaaaaca

SEQ ID NO: 392537 - RNA, 58 nt, Homo sapiens
cccgggaggcugagcuugcagugagcggagaucgcgccacugcacuccagucucuggg

SEQ ID NO: 392538 - RNA, 64 nt, Homo sapiens
ugauucaugguugguuaaaucuguguaugcagaacccauguauacagagagcaaacuguaauca

SEQ ID NO: 392539 - RNA, 77 nt, Homo sapiens
aaaaugcaaauuauugggccccaacuucugaucuacugaaucagaaacucugaguugagcccagaaauuuguguuuu

SEQ ID NO: 392540 - RNA, 81 nt, Homo sapiens
gguaucuuuauagcaguaucccaccaucugguagcaauuuacuguauuaguccguucucaugcugcuaauaaagacauacc

SEQ ID NO: 392541 - RNA, 66 nt, Homo sapiens
uaaggguguaaucuauauuucugacauuacaggucaaagauauauaguaaguauagagagcccuua

SEQ ID NO: 392542 - RNA, 70 nt, Homo sapiens
uggaaaguuuuucaacuccuacugaguucaacuccuacugaauugaggcaaugaggagaagcugccucca

SEQ ID NO: 392543 - RNA, 61 nt, Homo sapiens
ugagaaugaugauugguaaaccccucguagguggccuuugguguugccaggcguuauuuca

SEQ ID NO: 392544 - RNA, 79 nt, Homo sapiens
augucuuaaaaugagcucauuaaaguaggaccuaguccacuaugacugguguccuuauuagaagaguaaauguagacau

SEQ ID NO: 392545 - RNA, 66 nt, Homo sapiens
guuauagaaggaucuaaaugguaucccauauucaggcacagacacauugcagauccuucaaaugac

SEQ ID NO: 392546 - RNA, 64 nt, Homo sapiens
ggaagagguaagaaagucaguccuucugcggacacuguugagauuggcuuuuuaccuuaauucc

SEQ ID NO: 392547 - RNA, 70 nt, Homo sapiens
cugacuucaaaaaauuaauguguauccagggacauuuuaaaaaccuguacacaguguuuauugugguuag

SEQ ID NO: 392548 - RNA, 63 nt, Homo sapiens
gcuuuaugguacaugugcacaauguacagguuaguuacauauguauacaugugccauguuggu

SEQ ID NO: 392549 - RNA, 87 nt, Homo sapiens
ggagucuugcucuguugcccaggcuggagugcaguggcacgaucauggcucacugcgaccuccaccucccgguucaagcaauucucc

SEQ ID NO: 392550 - RNA, 71 nt, Homo sapiens
cagccaacuacagguaugaaagggaguaucuauaaagagagaucuccuugggugagccuguguuaggacug

SEQ ID NO: 392551 - RNA, 91 nt, Homo sapiens
cuucuuuccuccauaugacuggauuaguucuccagcaaggguucuuuacugggcugagauggcugaauucagaauauggauaggaaugaag

SEQ ID NO: 392552 - RNA, 85 nt, Homo sapiens
ggccagcuucaggcuuuguuacccucacucuaaagugauagagauucucugacaucuucaagugaggagagcagacgccugggcc

SEQ ID NO: 392553 - RNA, 58 nt, Homo sapiens
ggguuucuggucugugugauggagggcagcgugaacccaucacuggagaaggaaaccu

SEQ ID NO: 392554 - RNA, 75 nt, Homo sapiens
ggagaaggaaagaaaaaguaaagugcauuugauaaauucaaaugcucucuacacguuucugggcacacuuucucu

SEQ ID NO: 392555 - RNA, 64 nt, Homo sapiens
acagagaaauaaccuugcugcugaaauguuuacauuagcugagauggcaagaguuguucugugu

SEQ ID NO: 392556 - RNA, 89 nt, Homo sapiens
ggaguuucgcucuuguugccuaggcuggaguguaguggcacaaucauggcucaccacaaccuccgccucccggauucaagcgauucucc

SEQ ID NO: 392557 - RNA, 99 nt, Homo sapiens
gagauggagucuugcucugucacccaggcuggagugcaguggcaggaucucggcucauugcaaucuccaccucccggguucaagcgauucuccugccuc

SEQ ID NO: 392558 - RNA, 86 nt, Homo sapiens
auuagauuuagcucauuugaugcaucucuacuuuguuccugcuucugggaagagagggacuuauuaaagucuagcauaaaucuggu

SEQ ID NO: 392559 - RNA, 75 nt, Homo sapiens
cauucccaguuuuucauuuauacuaguaaauguaacauacaggaaacuacauuguaaauguaaacgcuguggaug

SEQ ID NO: 392560 - RNA, 68 nt, Homo sapiens
agggagugagucagucugcuguugcuuacucucggugcuggcugagcucagcaaccugcucucuuccu

SEQ ID NO: 392561 - RNA, 70 nt, Homo sapiens
agcuuuugcaggucaggggcagagaagugagacugauuucugccaggacaccugcgaacagauaccagcu

SEQ ID NO: 392562 - RNA, 62 nt, Homo sapiens
gaguucuagacucugucccuaggaagaaauaaagauccucccuaggaccaguucuguaauuc

SEQ ID NO: 392563 - RNA, 72 nt, Homo sapiens
uguuagguuggugcaaaagugauugcaaaaaguaauggcaaaaacagcaauuacuuuugcaccaaccuaaua

SEQ ID NO: 392564 - RNA, 58 nt, Homo sapiens
gucauugcuuaucugcugacguucuuccuuggcauaaagcagcagcugggcuugugac

SEQ ID NO: 392565 - RNA, 82 nt, Homo sapiens
acuggagaaugguuggcuaguagcacacuagguuaaaauugacccaaauuaaccaaaaucuacuagucaagucuuuuccagu

SEQ ID NO: 392566 - RNA, 56 nt, Homo sapiens
uucuuggcuugguaucaaauaaccaguucuugguuaugugcuggcugugccaaggg

SEQ ID NO: 392567 - RNA, 58 nt, Homo sapiens
gcccaggagcuggaggcugcagugaguggagaccgcgccguugcacuccagccugggc

SEQ ID NO: 392568 - RNA, 88 nt, Homo sapiens
aggcacuugcuggcuggcugagugguaaguagaggagugaauggcuccucacacccguccccgccagcccagcccucaguaucugccu

SEQ ID NO: 392569 - RNA, 91 nt, Homo sapiens
accugguccccaaagaacaucucauucugauuagaggaacugcuccagcacucaaagagagucagauuggcauuuguugggcggaucaggu

SEQ ID NO: 392570 - RNA, 62 nt, Homo sapiens
uucaucuggcaauucagagauuuauucuuggugcggauuuauuucuggagagcuagugugaa

SEQ ID NO: 392571 - RNA, 129 nt, Homo sapiens
uuauuauauagguaaacuguaucauggagguauggacuacagauuauuucaucagccacauaauaagcaaaauacucgagagguaguuuuuuggucgucucccuccugccacacuccacccucaaguag

SEQ ID NO: 392572 - RNA, 57 nt, Homo sapiens
ugcuauugugaauagugccacaauaaacauaugugugcaugagucuuuauaguagca

SEQ ID NO: 392573 - RNA, 91 nt, Homo sapiens
ugccuaggauaacacagcucauuaguggaagcaucaggacauggcuuuucaguucaaugcucuuucuacuauaaagugcugcauccaggca

SEQ ID NO: 392574 - RNA, 64 nt, Homo sapiens
gcuuuguuaggacaggucuagaauacccuuuaguuuaggguuaauuuugcacuccuacuaaggu

SEQ ID NO: 392575 - RNA, 92 nt, Homo sapiens
cccucagagacuggauuuaagggacauguguugccuaagucccaucuucaaaaugacccagcagugacacuguuccuuuuuacucuguaggg

SEQ ID NO: 392576 - RNA, 79 nt, Homo sapiens
gaaaaguaauggccaguuuuuaauugggucugauuaaaaaaauagagacaauccagugauuggauaccuuuuacuuuuu

SEQ ID NO: 392577 - RNA, 58 nt, Homo sapiens
gcaacacuggcuuugugaauacaucuucuaaagggaauuauucacucuccagucuugc

SEQ ID NO: 392578 - RNA, 64 nt, Homo sapiens
uuucccuuucugccuugaaucuuucaugccuccaggucaaaagagagagacagagacagggaaa

SEQ ID NO: 392579 - RNA, 114 nt, Homo sapiens
cggccucccgaaguguugggauuacaggugugaacuaggcugacacuauuaaauuauacuuuuggccgggugcaguguggcucacgccuguaaucccagcacuuugggaggcug

SEQ ID NO: 392580 - RNA, 58 nt, Homo sapiens
gucucgaacucuggggcucaggcgaucugccugccuuggucucccaaaguguugagau

SEQ ID NO: 392581 - RNA, 81 nt, Homo sapiens
gcccugaggagcaccagucccugucagugccaccaauucuuguaugucuuccggaggccugacugagagacgggugugggc

SEQ ID NO: 392582 - RNA, 101 nt, Homo sapiens
guuauaagggauuuuggguaucaucuaaccccuucauuuuacaggauaacagauucauugaggugagauggcuaccccaaguuaggaaucccaucaguagc

SEQ ID NO: 392583 - RNA, 56 nt, Homo sapiens
gugaggggaggugcaucugccauuaccgaggcuugaguaggugguuuuccccucac

SEQ ID NO: 392584 - RNA, 83 nt, Homo sapiens
ccauuaucauccucacauuguguagccugcucacugggcuggaaaaacccuguguguguuuacaaaugugaaaagugaagugg

SEQ ID NO: 392585 - RNA, 64 nt, Homo sapiens
gucaucaucauuauuauuucugagacagaguuucacucuguuggucaggcuagagugugguggc

SEQ ID NO: 392586 - RNA, 57 nt, Homo sapiens
ucugauggaguugccagggagagcucacaaccaugcuucaucugcuacuaccacagg

SEQ ID NO: 392587 - RNA, 74 nt, Homo sapiens
guuccacagggccucuggauggugagauaaagaaaagguguuuccuuuuuuccuuccacugucccuccaggaac

SEQ ID NO: 392588 - RNA, 58 nt, Homo sapiens
agauaaugaucacccacagugucuaaugggaaucagcuauucugugaugaucuugucu

SEQ ID NO: 392589 - RNA, 83 nt, Homo sapiens
auuaacugaugagagcuaacuguggguacaguuuucuuguauaagcacuuuaccaacauguuugcuuucaguucaacuuuaau

SEQ ID NO: 392590 - RNA, 77 nt, Homo sapiens
gucacucauaaugucuggcacaacauagguuacuugaguuguuacacucacaguacuguuguuugcugccauggugc

SEQ ID NO: 392591 - RNA, 73 nt, Homo sapiens
uggcacuaauagagucauuauuauuguucucacagauuagauggcagagccagugaugaagacucuggagcca

SEQ ID NO: 392592 - RNA, 73 nt, Homo sapiens
uuaaagacagggucucgcuauguugcccaugcuggucuugaauuccuggggucaagugaugcuucugcuuuaa

SEQ ID NO: 392593 - RNA, 112 nt, Homo sapiens
acaagguugaacugagcuagaugagauucuucuuugguacaagggccgaccagguccucugggcucauacuacacaaagaaaaagaacauuucauaaaucagugcaccuugu

SEQ ID NO: 392594 - RNA, 103 nt, Homo sapiens
cccaacugcagcaguucagagaaugucuuuuuuaaccauuugauacccauuugguagaauauaguauauuggagaugugucuugaaauuggaugccauuuggg

SEQ ID NO: 392595 - RNA, 102 nt, Homo sapiens
acuguuaccuggugcacuuaaucucauucguucccucauucauucauccuauguagaauucaggggcuacuagguguuagaaugaggagacaucagaacagu

SEQ ID NO: 392596 - RNA, 59 nt, Homo sapiens
ugagacugagucuugcucuuguugcccaggcuggaguacaauggcacgaucucggcuca

SEQ ID NO: 392597 - RNA, 55 nt, Homo sapiens
agguauuuagucuuguguccuauccuuucuuuuuaggauaguagauuaaauauuu

SEQ ID NO: 392598 - RNA, 85 nt, Homo sapiens
uucaaggccaguuugucucacuggaguuuaguaauugaaccauauggcuuauagauuauugaaucuaguguuacaagucucugaa

SEQ ID NO: 392599 - RNA, 60 nt, Homo sapiens
gaauaccucuuuguucaauaauauucccaaggucacagagaugaugaacagagaggauuc

SEQ ID NO: 392600 - RNA, 60 nt, Homo sapiens
ugugauuaaguuaacaauguugaguggugggauuauucacaugggugcaauauaaucaca

SEQ ID NO: 392601 - RNA, 107 nt, Homo sapiens
cuaggaguuuuuguuuguuuguuuguuuuugagauggagucucacucuguugcucaggcuggaguguaauggcgccaucucagcucacggcaaccucugccuccugg

SEQ ID NO: 392602 - RNA, 69 nt, Homo sapiens
cuuguugccuaggcuggagugcagugguacgaucuuggcucacugcaaccuccgccucccagguucaag

SEQ ID NO: 392603 - RNA, 80 nt, Homo sapiens
cuggccgaauugagauaauuuaauaggggaaaguauaguuuuuuauacagcuaaaauauuaaguuaucaaauguugucag

SEQ ID NO: 392604 - RNA, 95 nt, Homo sapiens
gccucccuuuuaaaauaaugaaacaaacauuguuuaaguuaaauuguuacuugguuccuccccacaguguuacuugauaguguauguuacgaggu

SEQ ID NO: 392605 - RNA, 92 nt, Homo sapiens
ucacuuguuaaaaugagcuaagugacuuguuaaagguugugugaccuuguuaaagaucacuuaacagucacuuagcucauuuuaauaaguga

SEQ ID NO: 392606 - RNA, 77 nt, Homo sapiens
agagucugaguucuuuagcaaggauauggggauggggaaguaauuuauauccuuauuuguuaaaaugcacagauuuu

SEQ ID NO: 392607 - RNA, 61 nt, Homo sapiens
cuauguccauauguucucaucauuuagcucccacuuauaagugggaacaugugguauaugg

SEQ ID NO: 392608 - RNA, 69 nt, Homo sapiens
ggugugugugugugcgugugcucaugcaugcacaagugaauuugcauacacaagcauacauguaccacc

SEQ ID NO: 392609 - RNA, 108 nt, Homo sapiens
ugugucgucucauggugggcugcuguccugaaaguguaucagacuugucaaauugguucaaauuaaauugacauggugcucuuucaggcaucaccacauuauuauaca

SEQ ID NO: 392610 - RNA, 102 nt, Homo sapiens
guggugaugguuucauggguguauacaugucaaaacucacauauugcauaauauuaaguguguacaguuuauuaugugucaacuaugccucaauaaagcugc

SEQ ID NO: 392611 - RNA, 105 nt, Homo sapiens
gacagcacccgccaauuugaauucccaggaagauuucaggagagucucuguuaaacaguaugcaaacauacuacauaugacaucuucuuuauccucuuugcuguu

SEQ ID NO: 392612 - RNA, 55 nt, Homo sapiens
guuucaggcaccauugucauugauaacaucuuaucaggagacaggguuuugagau

SEQ ID NO: 392613 - RNA, 81 nt, Homo sapiens
ccuccaaaguaacgcauacaguagaaaacaauggauuugaaaacaaaugcaaauuuuacuauuugagcggggcuguagagg

SEQ ID NO: 392614 - RNA, 111 nt, Homo sapiens
acagucuugauccuauggguucugaaaaguucuuugagccuugacaagcagacguauugguguuaagaagcccagggaauuggcagaggccugaagaugcacagaggcugu

SEQ ID NO: 392615 - RNA, 84 nt, Homo sapiens
uuuguauucauuuccgguuuguccugccaugguuuauuuuugcagaaauaagcacaugcgggcacauacaugguugugcacaaa

SEQ ID NO: 392616 - RNA, 90 nt, Homo sapiens
agcuagcaugauguuauagagguauuaacaguagaagaauuuauuagcaguaaucucuguguauggucccuuucugauguaaugcuagcu

SEQ ID NO: 392617 - RNA, 99 nt, Homo sapiens
agcugagccuuugguuuggaaaccuuguagccacagguggcaaggaaguuuaagagcgcuuggguggcuugauggcacaagguuucugaacaggcggcu

SEQ ID NO: 392618 - RNA, 55 nt, Homo sapiens
caggaggcggagguugcagugagcugagaucgcgccauugcacuccagccugcug

SEQ ID NO: 392619 - RNA, 67 nt, Homo sapiens
agagauuauccuggcuucucugugugcacuaaaucuaaucugagcccugaaaagcaggauauuuucu

SEQ ID NO: 392620 - RNA, 68 nt, Homo sapiens
cuuuagguucauuuccagcucagcauuuccauuguacggaugagcaaagagaugagacccuguuagag

SEQ ID NO: 392621 - RNA, 86 nt, Homo sapiens
ccccaauacaagcuauugaacuggauaaugagucagaaucuucccaugguauucguuggcuacuuguucauuucaucagccugggg

SEQ ID NO: 392622 - RNA, 75 nt, Homo sapiens
ugccauaauaggguuccuguggaggaacugugaauuuuacagaguguuuuucaugggauacuuuuuauuguggca

SEQ ID NO: 392623 - RNA, 124 nt, Homo sapiens
ggacuuaguucucauuuuccuccccuguuuucuccggauuguggcuauuguucccugguugcuagaucaaccuggagcacaguaaagcagugucacaaagcuggaaggggucugggaugagucc

SEQ ID NO: 392624 - RNA, 61 nt, Homo sapiens
ugugguacuaucuuugguuucaggcauucaguggguucuuggaacauacauaguccccgca

SEQ ID NO: 392625 - RNA, 93 nt, Homo sapiens
ggagaaucacugaagccuggggggcaggguugcagugagcugagaucgagaucaugccacuguacucuagccuaggcgucagagcaagacucc

SEQ ID NO: 392626 - RNA, 55 nt, Homo sapiens
ucacugugggcuuugaauccuguaaguaauuuaaaggcucaaaugcucccaguga

SEQ ID NO: 392627 - RNA, 102 nt, Homo sapiens
cucccuggaguguguggggaacucaggaccucuugccuggaagccuccugcagcuacaggggcuuccguaggagagauccugccuccggaucucccugggag

SEQ ID NO: 392628 - RNA, 55 nt, Homo sapiens
uccuuugguuauaggcaccucugcuuguuuaugcagggggcauuggccggaagga

SEQ ID NO: 392629 - RNA, 78 nt, Homo sapiens
aggagggguuugagcuggcuguggagaaaccccugccuauggucucaggguuccacuggccacuaauaagccuuucuu

SEQ ID NO: 392630 - RNA, 72 nt, Homo sapiens
cccaacggacugagcgaugggaggaagugauaagugcagcugucucuucagcccauggcuucuuccucuggg

SEQ ID NO: 392631 - RNA, 79 nt, Homo sapiens
gagaacugggauggaggagaauuagaggauggugugguguuucccaagacauccccugaucuugcuaucccagcaucuc

SEQ ID NO: 392632 - RNA, 125 nt, Homo sapiens
gggcaaauauuuggaugacuauagaaucugcuuaaauacuauggauuuacuguauagggugucaaaguaacaacuguagaguuagagucuauuaaagggggucucaacaaaaaauauuuaugccc

SEQ ID NO: 392633 - RNA, 93 nt, Homo sapiens
ucaaauuccacaagaucuuuaauuagcuguauggacuaugcuuaaaauacaauugagaauacuaugagauaauaaagacuuguuugguguuga

SEQ ID NO: 392634 - RNA, 107 nt, Homo sapiens
aaugaauaguaauguugggcaacuuuucauguguuuguuggacauuuuuauaaucauuuugaagaaauguuuauucaaacccguugcccauuuuuaauugguucauu

SEQ ID NO: 392635 - RNA, 84 nt, Homo sapiens
gaaucacuuauaccccuucccugugguauagaagccguaggucggcugggcuucuauaccacagggaaaggguguacgugauuc

SEQ ID NO: 392636 - RNA, 69 nt, Homo sapiens
ggaaugucuucugagcugagaaaugcagcagcucuagaguucugauuaguucagcuuugaaccacuucc

SEQ ID NO: 392637 - RNA, 55 nt, Homo sapiens
agccaaagaguauuaggagcaaugaaaacguguagugacuggauacccuuuggcu

SEQ ID NO: 392638 - RNA, 70 nt, Homo sapiens
ucaagaaguuugcugucuguagccaaaggacucagaaaugagcagucuggcgagacagaaaacuuuuaga

SEQ ID NO: 392639 - RNA, 74 nt, Homo sapiens
uuauguccuuuaacuucaucacaagcacaagaaagauuaguacauuuugcaggugaggagucugaagcacauaa

SEQ ID NO: 392640 - RNA, 111 nt, Homo sapiens
aagugagagagaagcuggauaaaguagaggugaggugcauggacacuggguacuuccaugcguuucauuccuacuuuuauuuccagccuuugcuauugaaucuguucacuu

SEQ ID NO: 392641 - RNA, 89 nt, Homo sapiens
gagaggaugcaggugacuuuucugagacaaugcuuugcagcuuguaugagauucuuagagaagucugguccucccugccccagccucuc

SEQ ID NO: 392642 - RNA, 57 nt, Homo sapiens
ggguguauacauguguguucacgcaugugugcauguguguuugugguguguauaccu

SEQ ID NO: 392643 - RNA, 75 nt, Homo sapiens
cuccuucuuaccagcgcguuuucaguuucauagggaagccuuuccaugaaacuggagcgccuggaggagaagggg

SEQ ID NO: 392644 - RNA, 66 nt, Homo sapiens
augaaguuuucuggagugugaaguggauaugucuuauaaguuuaauucacagcuucaccacuucau

SEQ ID NO: 392645 - RNA, 85 nt, Homo sapiens
auuuuaucagaugcgauuauuaugucacuuccucugggccacaguauacccaaauucaggagugaugaugauguauuuuuaaaau

SEQ ID NO: 392646 - RNA, 107 nt, Homo sapiens
auaucuaugaauuuccuguaaaguuuucucccuuccugccuucaucuucauauagauauagaugaaggcaggagggagaaaagugacagguaaaaauucagacauau

SEQ ID NO: 392647 - RNA, 60 nt, Homo sapiens
auaacuauucuggcuaggacuuucagugcuaugcugaauucaaguagugagagugguuau

SEQ ID NO: 392648 - RNA, 67 nt, Homo sapiens
ucugggaugguggaugucaguggacaguuuucuggaacagucgauuccaguggguuuacaucccaga

SEQ ID NO: 392649 - RNA, 79 nt, Homo sapiens
uaggauugaugaggggugguauaugcacacaacuccacaagagucuuuuugugcaagaaucagccuaucauuauuuuug

SEQ ID NO: 392650 - RNA, 87 nt, Homo sapiens
guacuaauauagcuauagauauguagauuaauuucugggcuuucuauucuguucucuugaucuaugugucuguuuuuaugccaguac

SEQ ID NO: 392651 - RNA, 78 nt, Homo sapiens
ugguuuuugucguugguucuguuuaugugcuggauuauguuuauugauuugcauauguugaaccagccuugcauccca

SEQ ID NO: 392652 - RNA, 61 nt, Homo sapiens
guaagugauagaucugggauucagaaccaggucuccuuuccccaggauucuguuacauuac

SEQ ID NO: 392653 - RNA, 70 nt, Homo sapiens
agcuguuguuuuaagauacuaaguuugugguaauuuguuacacagcaauagaaaauuaauacagcaugcu

SEQ ID NO: 392654 - RNA, 69 nt, Homo sapiens
gagcccagcgaggcgugaucaguuugaggucagagguguugaauagacagucacugccuccccuggcuc

SEQ ID NO: 392655 - RNA, 84 nt, Homo sapiens
guucuguguucacgaauccauuugccgucuauccauuuugcuauacgagauguuaguuacaaauggugcccuuugaacuggagc

SEQ ID NO: 392656 - RNA, 101 nt, Homo sapiens
ugaggcaggagagucguuugaacccaugagguggagguugcagugagccaagauugugccacugcacuccagcuugggugacagagugagacuccgucuca

SEQ ID NO: 392657 - RNA, 64 nt, Homo sapiens
auugugaauagugccgcuauaaacauaugugugcaugugucuucauagcagcaugauuuauaau

SEQ ID NO: 392658 - RNA, 66 nt, Homo sapiens
gggugcguucugagaaguguguuguuaggcaguuucguccuuaugugaacaucauagaaugcacuu

SEQ ID NO: 392659 - RNA, 82 nt, Homo sapiens
aguuccuucaggguaagaaccaugaaguaaauguacaaaauguugguacauguauccauuguuuuugguuuuccagggggcu

SEQ ID NO: 392660 - RNA, 71 nt, Homo sapiens
gaugacuaaugccauggcccaccaggucagggccaugcuacugaccugaaggccauggaacaguggugguu

SEQ ID NO: 392661 - RNA, 61 nt, Homo sapiens
gggaaguccacugucugguaaggggcugauucuuggcuuauuaacagacaagugucuuccc

SEQ ID NO: 392662 - RNA, 75 nt, Homo sapiens
cugaauaaaaagaagacuucuuuaggcuuuaauguuuucuauguuauagcacugaaagaggugauucuuauucag

SEQ ID NO: 392663 - RNA, 61 nt, Homo sapiens
aaugggaaugugcacuauguauuaaguguguacaugcaugcauggagcauacauuucuguu

SEQ ID NO: 392664 - RNA, 103 nt, Homo sapiens
ggcugagccaggaagaacgcuccagcccaggacuucgaggcugcaaugagcuauaauugcaucauugcacuccagccugggcaacagagacccugucucaacc

SEQ ID NO: 392665 - RNA, 66 nt, Homo sapiens
aggaaauccaguuuggaggcuugauguggguuuugaccuggccucagccuuggggcuguuuuuccu

SEQ ID NO: 392666 - RNA, 85 nt, Homo sapiens
cuuaucuuuggcauguuuaguagaauguggugaucauuuugaauugaucugagccccgugcuucuaguaaacaguaacagguaag

SEQ ID NO: 392667 - RNA, 92 nt, Homo sapiens
cauggaugauauggaugugugugugcaugugcacaaauuauauguaugugugugaguguguaugugcauacacaagcuuaugugucucugug

SEQ ID NO: 392668 - RNA, 112 nt, Homo sapiens
ccuggugucugagggguuuuguccacagcuuguccugcuacauuucuugguucucugacugggaagcgaggugauuagcagacagucaaggcagccccuuagguggcucagg

SEQ ID NO: 392669 - RNA, 93 nt, Homo sapiens
uuuauuuuaucuguaaaaggaaggcauaggacucaaugaucuuuaaggucccuuagagaucuuauauuuuaugacucaacauggugaaaugaa

SEQ ID NO: 392670 - RNA, 84 nt, Homo sapiens
gucuguuucugcuuuggggcggccguggugaguacccagcaaauaaauguaccaccacucccgcauucuaaaaccagggcagac

SEQ ID NO: 392671 - RNA, 72 nt, Homo sapiens
auaauuccuaauaacggagcuaccuuucuccaguugucucauccugagugaaggggcucuguugugauuuau

SEQ ID NO: 392672 - RNA, 101 nt, Homo sapiens
aggcagaaacaggccauuuucacuucuuuugugauucuucaguuacuucaggccaucuggauguauacgugcaggucacaggggauaugauggcuuagcuu

SEQ ID NO: 392673 - RNA, 80 nt, Homo sapiens
uugcacuuucugaaucuacuuugcugcugaauccuacauuuuguaggggcugcuugaguaguaagugguucaccguguaa

SEQ ID NO: 392674 - RNA, 87 nt, Homo sapiens
caaaaugauagcauguuugguagugaauaugguagucagacacugguuauaucauuuuaccauuauuaacuauguaauuucauuuug

SEQ ID NO: 392675 - RNA, 88 nt, Homo sapiens
guggacuuaggagguagagagugcuuuggguguaggccagguaaguuucuggucugccugcauuaggcacuugguagcuguuagcuau

SEQ ID NO: 392676 - RNA, 55 nt, Homo sapiens
uucccuuugugcauaggauuugucuuccuuuauucaucuuucugcaucuggggag

SEQ ID NO: 392677 - RNA, 129 nt, Homo sapiens
ggaauuuggcaagaauucuaucuaguaauuuauaaagauuugagggaggccucaguuuacauauauuuuuuaagucugaauuugagguuuuccuagaaauaaauagcuacaauaauauuuuaaaauucc

SEQ ID NO: 392678 - RNA, 73 nt, Homo sapiens
gcccgaggccugcaguucuccauguccucuccuugaccccgcccgaggugcaaacuccaggucucuucagggc

SEQ ID NO: 392679 - RNA, 90 nt, Homo sapiens
gcagaccuccuauuauucugucuuuggucucaaucaaggagaagaugccguugagaagccucaaagaaggaagcagaaaggagaauuugu

SEQ ID NO: 392680 - RNA, 64 nt, Homo sapiens
uuuuuuagaugcagcuaaagcagugcuugagggaaaugcagagcuuuaugcuguguuagaaaag

SEQ ID NO: 392681 - RNA, 56 nt, Homo sapiens
uuuagcagcaaagagccaugcucuguaaaagagauaguggcucucagcuugcuaag

SEQ ID NO: 392682 - RNA, 63 nt, Homo sapiens
gccaaagaaaagugucuguuccuagcaugaggaaaccuuguuaagaaaagggcauuugauggc

SEQ ID NO: 392683 - RNA, 83 nt, Homo sapiens
uauuagguuggugccaaaguaauugcuguuuugccauuaaaaauaauugcaaaaacugcaauuacuuuggcaccaaccuaaua

SEQ ID NO: 392684 - RNA, 72 nt, Homo sapiens
uugucucccagugguagagagauacuuuaggcaaaauaauugaacuucuaaaguacuacuacuguuggauaa

SEQ ID NO: 392685 - RNA, 64 nt, Homo sapiens
ucagaagauuggcacuuauuagcacccugagcuaccuaaaagaauaagugcuugagacuucuga

SEQ ID NO: 392686 - RNA, 63 nt, Homo sapiens
cuauguguccauguguucucaucauuuagcucccacuuaucagugagaacaugugguauuugg

SEQ ID NO: 392687 - RNA, 85 nt, Homo sapiens
aaaaucagaugacuguacaugcauaguuuauuucugagcucucuguucuaguaaguaaacuaugcauguauggucaucugauuuu

SEQ ID NO: 392688 - RNA, 90 nt, Homo sapiens
ggacacuaagcccaaauugccuccuucuucugcaaaguauuguugaggaacaggaagugggaagagggagcgauuuuggagcuuggguuc

SEQ ID NO: 392689 - RNA, 60 nt, Homo sapiens
uagguuuuuugcagagagauccacuguuagugugaugggcuucccuuuguagguaaccug

SEQ ID NO: 392690 - RNA, 62 nt, Homo sapiens
guggaaggcaagagaaaauuucgaguuauacuagauaaaucaaaaagcuuuugcucuuucac

SEQ ID NO: 392691 - RNA, 95 nt, Homo sapiens
caaugcagucucuuuuuugguuccauaugaacuuucaaguaguuuuuuccaauucugugaagaaagucauugguagcuugauggggauggcauug

SEQ ID NO: 392692 - RNA, 83 nt, Homo sapiens
gguggaggauuucuguguuauggaguauaugugaacugaacuugaacaaguacuagcagacuguucuucauaacuccugugcc

SEQ ID NO: 392693 - RNA, 69 nt, Homo sapiens
ccugguuaucacuguuguuuguuuaaggcuuuaggccucuacaaugagcaagugguaaaauaaaccagg

SEQ ID NO: 392694 - RNA, 57 nt, Homo sapiens
caaaggcuucugaaacugcagagauaucauugcuaugcaagaaacccagagccuuug

SEQ ID NO: 392695 - RNA, 90 nt, Homo sapiens
gacuguagcuuuguaauguguuuugaaaucaggaagucugaggccccuagcuuuguccuucuuucucaagauuguuuuggcuacuuaguc

SEQ ID NO: 392696 - RNA, 77 nt, Homo sapiens
gaguuaucaauaaguaguaaagcagugacuaguaaauaauuggcaagugcuuuaucuacauuaucuuauaugaacuc

SEQ ID NO: 392697 - RNA, 59 nt, Homo sapiens
uccagggagaguggugcugccucagaacacaaagaugagaauguagggcucucccagga

SEQ ID NO: 392698 - RNA, 65 nt, Homo sapiens
uuuguccacuguugugucuucagugccugccauagagcaggcaugaaauacaugcauugaauaaa

SEQ ID NO: 392699 - RNA, 67 nt, Homo sapiens
ggaccacauuaccuugcuugcuccaacuuuauaguaagucuugaagucagguaauguaauguaauuc

SEQ ID NO: 392700 - RNA, 61 nt, Homo sapiens
aaugcuguguuauuucaugaccacaucaucacuauuugaagucauguaaugacuuaguauu

SEQ ID NO: 392701 - RNA, 86 nt, Homo sapiens
uuccauuaaagucugaucccuuuuuuaaauagcuguuuggcuaaucuguugugguagacacuguugaaaaggccccacuuucggaa

SEQ ID NO: 392702 - RNA, 76 nt, Homo sapiens
ugcaauuccugaguguagaaacuucuugcacuuauuuaaaauuuaggagagaacauuuaagccacucagguaugca

SEQ ID NO: 392703 - RNA, 57 nt, Homo sapiens
gguucugcaggaaacagaacaaggauuaauuauugaugucugucuccgaguagaauu

SEQ ID NO: 392704 - RNA, 59 nt, Homo sapiens
aagucaaggagagaagcuucaggagaaaccaacccugcuggcacuuugaucuuggacuu

SEQ ID NO: 392705 - RNA, 87 nt, Homo sapiens
cgaggcaaugguaaguaucaggaauaguuauuggcgaguccagcacagcagucaaugacuguguucuggacugcaccguuggacucg

SEQ ID NO: 392706 - RNA, 73 nt, Homo sapiens
uuacgaauaaugucacaggggguuagccuguguaauaucacaggguguacacccccugugacauuaggaguaa

SEQ ID NO: 392707 - RNA, 89 nt, Homo sapiens
gcagagaauucaugacuaaguccucaaaagcaauugcaacacaaacaaaaauuggcaagugggaccuaguuaaacuaaagaguuucugc

SEQ ID NO: 392708 - RNA, 67 nt, Homo sapiens
agcugaucgcuuuuauguuuaauuuuguuaauaggauuuucuguacacaguaaacuaaaagcuagcu

SEQ ID NO: 392709 - RNA, 97 nt, Homo sapiens
cagugaucucauaaagugcacugagaauaguugccaaaguuuuguuaagagcuuuuugggcagcuauugacuuuauauaauguuuauuagauuacug

SEQ ID NO: 392710 - RNA, 76 nt, Homo sapiens
cuuuauggccagcuguguccuaucuguaagcagcauagcuugccagcugcucuucuuagcacaucuggcuguagag

SEQ ID NO: 392711 - RNA, 64 nt, Homo sapiens
aucugacuuuuaauuugaaaacaugaggauuuccccauauuuuuauaaaguggaaguaccagau

SEQ ID NO: 392712 - RNA, 86 nt, Homo sapiens
gcaauguaguccacauccaucagacggcaggcguugaguaccagagaggcauaccaugucuauaaucugaggacauccugcauugc

SEQ ID NO: 392713 - RNA, 80 nt, Homo sapiens
ucugcaaguuccccugcagagcaggagaggcaucgggagcucguggucccccuccacucucgcaaaccuggggaaccaga

SEQ ID NO: 392714 - RNA, 67 nt, Homo sapiens
uaauaacuaugugaggugcugaauauguuaauuacuuugauugacauaaucauuucacaguguauua

SEQ ID NO: 392715 - RNA, 72 nt, Homo sapiens
cuaccugugaagauguuucuuaauugacuuaaccaaaaucuuauugauuaauuuguauacaucuuuggguag

SEQ ID NO: 392716 - RNA, 61 nt, Homo sapiens
agaaaguuccaugcgcuguugaauagaauguguauucugugguuguugcauggaauguucu

SEQ ID NO: 392717 - RNA, 68 nt, Homo sapiens
aucauggaggauggugacaccauuggcuauggggagucuuggcagauggugacaccauuagucauggu

SEQ ID NO: 392718 - RNA, 82 nt, Homo sapiens
ggggaggcccagugucugacagacacggcggcaggccugggacaaggggacagccgcacguguccugugggaacuccacccc

SEQ ID NO: 392719 - RNA, 57 nt, Homo sapiens
ggcaggucaucgauucauaaacacugagaguguuuucaugugauaguugaaccugcc

SEQ ID NO: 392720 - RNA, 63 nt, Homo sapiens
ccuuuuucucucauugcaggcagcaucugaagcagacguagaaacugcacugagaaaaggagg

SEQ ID NO: 392721 - RNA, 63 nt, Homo sapiens
uaaggaggcugcugugaagaaaggacaugcaauuccuccugccaucacacuguggcuucuuua

SEQ ID NO: 392722 - RNA, 64 nt, Homo sapiens
uucaguuugccaauauuuuauugaggauuuucacaucgauauucaucagaauuauuggccugaa

SEQ ID NO: 392723 - RNA, 61 nt, Homo sapiens
uaaggauuuuggugauuacacugagcccaccaggauagucucccugaucucaagauccuua

SEQ ID NO: 392724 - RNA, 75 nt, Homo sapiens
agaaaaauuuuugagguauugauaaaacauuuauguuuaugcaugggugcauguguguauacucaaaaacuuucu

SEQ ID NO: 392725 - RNA, 71 nt, Homo sapiens
gcuuuggcauguagauguaugggaaucaaaauacuugcccaacauuauauaucugguucaaaugucaaagc

SEQ ID NO: 392726 - RNA, 69 nt, Homo sapiens
agguucugcuccuugggaugugaauucacugggucuagagacuugagcaucucuaaaaggagcaaaucu

SEQ ID NO: 392727 - RNA, 77 nt, Homo sapiens
ugaaucauacaguaguccucacuugugcaaacccuccucauucaguucauacaagcuaaguugcugcuugugauuua

SEQ ID NO: 392728 - RNA, 57 nt, Homo sapiens
gucaggugcuuacgcggagaucuccuucccguucaggauuucugcuggcgccauggc

SEQ ID NO: 392729 - RNA, 67 nt, Homo sapiens
ccaucugucagggagggauagaugauuaauagcaucuguucuagucauccacucuccuuguggaugg

SEQ ID NO: 392730 - RNA, 68 nt, Homo sapiens
cugugccauuaggcgauuuuguugugugaacgucauggaguacacuuagacaaaccuagaugguacag

SEQ ID NO: 392731 - RNA, 62 nt, Homo sapiens
guuagcuguuggugggaagucagagacucacuguuucugcucaacaaacaccagcaguugau

SEQ ID NO: 392732 - RNA, 75 nt, Homo sapiens
guuaggcuucaguucuguaaggacagcagugguuuucuuuucuguucacucuguagccucagaacuggguguaau

SEQ ID NO: 392733 - RNA, 87 nt, Homo sapiens
ucuaaaaucaaugcagcuuuuggagagaaagggcaucaggugcguuaacagcagcuuucaucucucagcagcuaguaauguaaugga

SEQ ID NO: 392734 - RNA, 64 nt, Homo sapiens
uggcugcuguacagguuccauuugaaugcccugauagaggacuauggcaccugacagauagcca

SEQ ID NO: 392735 - RNA, 56 nt, Homo sapiens
uuggucugcucugauguuuucuaucugacagagagaaggcugagcagacaggccaa

SEQ ID NO: 392736 - RNA, 93 nt, Homo sapiens
aucugccuugaucauagagaaacuaagccaaggcuuauuugguuuugaugucuagcacagugguuaaguuucuuauuuucaaguucagcaggu

SEQ ID NO: 392737 - RNA, 129 nt, Homo sapiens
uauguauauauguguguguguguguauaguuauaauuauaguuauauauaguuuauauauaguuauauguggaaauguauaugugucuguauuuuuuguauauguagaccuacaaaauuuguauaugug

SEQ ID NO: 392738 - RNA, 79 nt, Homo sapiens
uuacucacugugcuagcugcuguauguacacggauaaaucagauggucuuaucucccagcaguucauagucuagaggga

SEQ ID NO: 392739 - RNA, 79 nt, Homo sapiens
gacaauucuuggcagaguuaauuuguugagugccuuuaaaaguaaaaucauauuagcagauugcuuuucagaaguuguc

SEQ ID NO: 392740 - RNA, 74 nt, Homo sapiens
uucuuaauggcaucuagaguggugaaucuuuuccagaagguuuuuaauuuacuuugcucagauccaucagagga

SEQ ID NO: 392741 - RNA, 61 nt, Homo sapiens
cauccuggcucuguuagaagaaccaguucagaagagagcugguuguuuaaggagccuggug

SEQ ID NO: 392742 - RNA, 103 nt, Homo sapiens
ugaggcaggagaaucgcuuaaacucgggagggggagguugcagugagccaagaucacgccauugcacuccauccuggguugacaagagugaaacacugucuca

SEQ ID NO: 392743 - RNA, 62 nt, Homo sapiens
uggcucuuauauuuagguuuccgaaguuagaguuaauuuugguguauuguauaagguaguca

SEQ ID NO: 392744 - RNA, 84 nt, Homo sapiens
cucaggaggacaauauggagacugaucccucuuuccucuccucugagggaggucgaggaagcgcucagcucucuuuccccugag

SEQ ID NO: 392745 - RNA, 77 nt, Homo sapiens
ugcgcguccgugugaagagaccaccaaacaggcuuuguaugagcaacauggcuguuuauuucacaugggugcaggcg

SEQ ID NO: 392746 - RNA, 105 nt, Homo sapiens
ggaggaggaggugaaaguggaggagaaagaagcauuucucuagcaguacugugcuugguucugaaguggcaguguuuucauuucuuucauuccauuuccaccucc

SEQ ID NO: 392747 - RNA, 64 nt, Homo sapiens
auugugaauagugcugcaauaaacauacaugugcaugugucuuuaugguagcaugguuuauaau

SEQ ID NO: 392748 - RNA, 68 nt, Homo sapiens
cagguguuugguugcauggaaaauuuauuuaguggugauuucugagauuuuggugcacccaucaccug

SEQ ID NO: 392749 - RNA, 130 nt, Homo sapiens
gagacuuggaaaaguaguucaaauaugcagccuaacagauaaagaugguuucauuuggcuguuagucuauugagauaauuuacuuguugaggaauguuuauuuaauguuuccauaaaaaauugaagucuc

SEQ ID NO: 392750 - RNA, 56 nt, Homo sapiens
uggauaguaauaaacauauaggugcagagguaucuuugugguaugauaauugucca

SEQ ID NO: 392751 - RNA, 68 nt, Homo sapiens
acugggugaaugguuuuuagagaacaauguauuugcauuugcauugugucaaaacauuauucccuagu

SEQ ID NO: 392752 - RNA, 108 nt, Homo sapiens
gcuuuuugacgugcugcuggauucgguuugccaguauuuuauugaggauuuuugcaucgauguucaucagggauauuggccugaaauuuuuuguuguugugucucugc

SEQ ID NO: 392753 - RNA, 70 nt, Homo sapiens
agcaauaaugauguguguuuaagaugucuguuauaacacagacagccuuaaacuacacaugucuuuugcu

SEQ ID NO: 392754 - RNA, 94 nt, Homo sapiens
guggcuuggcugugguuugggugagcaguguccuugggggcaagcaauuugcucccaccagguacacgugcucacuggggccccagggagccac

SEQ ID NO: 392755 - RNA, 62 nt, Homo sapiens
auaugucuggcagaagacuucucaguggaaaccucauaugcugagagaguggcaugacauau

SEQ ID NO: 392756 - RNA, 67 nt, Homo sapiens
gcauaaucuacuugacugaguacaggagaguaacaauagucuucauagucuaugcaaguaagagugc

SEQ ID NO: 392757 - RNA, 59 nt, Homo sapiens
uggagagcacugucucauuuuggaaaauuaucuauuucugaaaugugcacuguuuucca

SEQ ID NO: 392758 - RNA, 73 nt, Homo sapiens
gugugccaucaaaguaucucaauaugguagaauuuuuucuccuuuguggaaauacuuguggugccauguacau

SEQ ID NO: 392759 - RNA, 91 nt, Homo sapiens
gagauugucacagaaacuguugguuaaauuccaugcaggcguuacuuuacuucucugcuggaagaugccaauuuuguucugauggcuccuc

SEQ ID NO: 392760 - RNA, 109 nt, Homo sapiens
gcugagugacauuagugucaucaaugaccuugcagagcccauggaugucacucuccacagacugacgcauggccagcucugucucauacuugacucuaaggucaucagc

SEQ ID NO: 392761 - RNA, 103 nt, Homo sapiens
gauaaggcuuugccuuaagggaauguuguggcugguuggauguuuuauccagaccacuaaaacuuucuccauaucaccaauaaggcugcuuugcuuucuuauc

SEQ ID NO: 392762 - RNA, 56 nt, Homo sapiens
uauugucacuaaaggaagcugggcggucaccagcacuggcuuucuaugcgacagua

SEQ ID NO: 392763 - RNA, 82 nt, Homo sapiens
gcgggaaaaucugacagucucauugauuugcucucuuugccaucaccacucuugagaggaagaaaugugacuucaaacuugc

SEQ ID NO: 392764 - RNA, 57 nt, Homo sapiens
cuggauauguugcaacauuucccacuaauuacuuggugacuggugucagauguccag

SEQ ID NO: 392765 - RNA, 109 nt, Homo sapiens
cuguugcccaggcuggagugcaguggugugaucuuggcucacugaacccucuuccucuuggguucaaguaguucucaugccucagccaccccagaaccuggaacuacag

SEQ ID NO: 392766 - RNA, 129 nt, Homo sapiens
cucggccucccaaagugcugggauuacaggcuuaagccaccgugccuggccuaaaaaagccuguuuaaaaauguuuuaggcugggcacgguggcucaggccuguaaucccagcauuuugggaggcugag

SEQ ID NO: 392767 - RNA, 103 nt, Homo sapiens
ccauauuuuuagguauuugguauagcaguaccucacuucugaguaucaauuuucugucuuagaucauucaggcugcuauagcaaaguaccauagauuggaugg

SEQ ID NO: 392768 - RNA, 55 nt, Homo sapiens
auggcauacaaaguggauaugaagaaauaaaauuauaucuacuugcaaaugccau

SEQ ID NO: 392769 - RNA, 74 nt, Homo sapiens
agacuguuugacuccagagugaguaaauguuagauagauuaaaucuuuacuuuaucuggcuuuagauuuggucu

SEQ ID NO: 392770 - RNA, 58 nt, Homo sapiens
gucucacuucauuuucuuagcccaagcuauagaaaggguugagauuguaugaggagau

SEQ ID NO: 392771 - RNA, 74 nt, Homo sapiens
ggagguugcccugcgagcauuguaggaaguucagcugccccucggcugacacccauagaugcuaguggcacucc

SEQ ID NO: 392772 - RNA, 70 nt, Homo sapiens
ggugcaagcuguugguggaucuaccauucuggggucuggaggaugguggcccucuucucacagcugcacu

SEQ ID NO: 392773 - RNA, 63 nt, Homo sapiens
auguggucugugcaagagugaaaggagcuaaagaugacuccaaaagcuguugucagagcacau

SEQ ID NO: 392774 - RNA, 68 nt, Homo sapiens
ugccuuguuuauauguucugagauuauagucauauguuuauguguucugagauuauauuaacauggua

SEQ ID NO: 392775 - RNA, 68 nt, Homo sapiens
ggguacaugugcacagugugcagguuaguuacauauguauacaugugccacgcuggugcgcugcaccc

SEQ ID NO: 392776 - RNA, 87 nt, Homo sapiens
cccguuccacccugcugcgcacagugaagagguaaguccagccaugggacucucaucucaguggugcuggcaggggaggacauuggg

SEQ ID NO: 392777 - RNA, 73 nt, Homo sapiens
aaggcaugauuguauuuugcucugugauaaggacaugagauucugggauaucaggguaagaauaauaugguuu

SEQ ID NO: 392778 - RNA, 70 nt, Homo sapiens
guucuguuccucuagagaaccuggacuaauauagauuuugguaccaguaaugguucuagaggaacagaau

SEQ ID NO: 392779 - RNA, 82 nt, Homo sapiens
ccacccagaaucucagaaugugaucuuauuuggucuuugcagauguaauugguuaagauaagaucauacuggauguggaugg

SEQ ID NO: 392780 - RNA, 67 nt, Homo sapiens
uugaagagguagucugucccuuagcagagcucgaacgcugugcugggagauccacugcucucuucag

SEQ ID NO: 392781 - RNA, 55 nt, Homo sapiens
uguucucacucauaugagggagcuaaaauaguugaucucauagagguagagaaua

SEQ ID NO: 392782 - RNA, 99 nt, Homo sapiens
gagcugauagcacauaguguagacaagugaauacaggauucucuggguuauauuuccagaagucuggaggucauuuggauauuugugggcccuuggcuu

SEQ ID NO: 392783 - RNA, 91 nt, Homo sapiens
aggacugugguggacuugggggguucucaagaucaagugacccuccggagucuuuugcacuugaaaacacucucauucuccaccuguaccu

SEQ ID NO: 392784 - RNA, 71 nt, Homo sapiens
gauacaaacaauacauagggagaagggagauuuaaaaaguaucaacuaccaugcagguguauguuuguguu

SEQ ID NO: 392785 - RNA, 69 nt, Homo sapiens
ugacauggaagauguucaugauauacugcuuaagugaaaaaagcugguuucugaacauuaucuauguua

SEQ ID NO: 392786 - RNA, 58 nt, Homo sapiens
uuggccuuuucaaugccucuuucccaaaccauuaauagagaggcacaguaaaugccaa

SEQ ID NO: 392787 - RNA, 100 nt, Homo sapiens
ucuggcucaaguuucuaauauccuuuuaaauguaaaugagaaauauauauacauuauuccauugaacaugaaggaaugugugccauggauuuggcccaga

SEQ ID NO: 392788 - RNA, 129 nt, Homo sapiens
caaacacaaucagcaucaccuggaagguuuugagaaugcagaaucucgugcaccaucccagauccacugaaucagaaucugcauuuuaaacaagacuccccagguaaauuauaugcauauuaauguuug

SEQ ID NO: 392789 - RNA, 82 nt, Homo sapiens
gugauagucucaugucuaauuugagguuccagaagcccuuuaaaggguggaugagcugcacaaauggaugugagggaguuac

SEQ ID NO: 392790 - RNA, 86 nt, Homo sapiens
gguccucccugucacacgugggcuuacgggauguggggggugguccuccccgucacacgcaggcuuacgggauguggggguggucc

SEQ ID NO: 392791 - RNA, 77 nt, Homo sapiens
guguaagguuucuucuugugcuuaauggguauaagguuucuucuugugcuuaaugaguguaagguuucuucuugugc

SEQ ID NO: 392792 - RNA, 65 nt, Homo sapiens
cugagguaacaaacuaugaguuacugucucugcuacuaaacuguugcuuauaauguuaccuguag

SEQ ID NO: 392793 - RNA, 80 nt, Homo sapiens
gaucccuugaaguagguaccguucaauuccccuauuuacagacaaggaaauggauugcaugguaccuacuucagaggguu

SEQ ID NO: 392794 - RNA, 70 nt, Homo sapiens
gguguuucugguucuagaaccuugaggaaucaccacacugucuuccacaaugguugaacuaauuuacacu

SEQ ID NO: 392795 - RNA, 80 nt, Homo sapiens
uagcuaggcuaucauauccuagauauaacuucuauuacuauguaagaaguaaagaacggauauuggaaggcaucuagcua

SEQ ID NO: 392796 - RNA, 57 nt, Homo sapiens
cauuuauucauuugcuagggcuagaggcuuagcacagucccuggcacauggaaaaug

SEQ ID NO: 392797 - RNA, 71 nt, Homo sapiens
uuuuaaccugggcauucuuugaguucucaguuucgaggugauggggagcaaaaaugaugcccaaguucaaa

SEQ ID NO: 392798 - RNA, 76 nt, Homo sapiens
guaucuuuauagcaaugugccacucucugugccaauuuucuguguuagucuguuuuguauugcuauaaaggaauac

SEQ ID NO: 392799 - RNA, 86 nt, Homo sapiens
ugccacuggguuguguccccaugcaguuggucagagucccuucagagugguggccuuggcaauggcuggggcugaaacaaguggca

SEQ ID NO: 392800 - RNA, 63 nt, Homo sapiens
agugugaacagaaccugggaucgaagucacuccugugauuaggugacuaauucuguucacauu

SEQ ID NO: 392801 - RNA, 81 nt, Homo sapiens
uuugcaaaggaccauuguguagcagacauaagguguucacuauaauuguuccggaugucagcuuuacaauucguuucuaaa

SEQ ID NO: 392802 - RNA, 78 nt, Homo sapiens
uagugagguuuuagaaaguagaaaagcugguugauaguguaaggaauuuuuaggccaauuuucuauuuuuuccuucua

SEQ ID NO: 392803 - RNA, 74 nt, Homo sapiens
guagauggauuucagauguguagggagcuaugguuugaauguccccuucaaaacacguguugaaauuuaauugc

SEQ ID NO: 392804 - RNA, 59 nt, Homo sapiens
ugucuuuaagcaaacaguguuuguguaaccaccuuguagcaacauucagcuugaagaua

SEQ ID NO: 392805 - RNA, 59 nt, Homo sapiens
uggaguguaauuagccaucagucucucuucuccuuggacugaaauggccucucgcucua

SEQ ID NO: 392806 - RNA, 55 nt, Homo sapiens
caugacacuggcauguuucuuuagugaugauaaaggcgacaugaucaguggcaug

SEQ ID NO: 392807 - RNA, 77 nt, Homo sapiens
gggaaccugcucauuuugcguugaauuccgucuguauuuuucuagauaugugacuucaugcaaggcuuuauauuccc

SEQ ID NO: 392808 - RNA, 67 nt, Homo sapiens
uaagaggcaaguugcucaaaugcaaaaugaaugguuaguuuguucagugcaauuugaaauccuuuug

SEQ ID NO: 392809 - RNA, 97 nt, Homo sapiens
gucccuugaauguugccaagacauauuucaacgcuuucccuuuuaaugauucaguuguugaaaucaucacuuggcaugcaaauaauauuuauggggc

SEQ ID NO: 392810 - RNA, 69 nt, Homo sapiens
uaugauuuuugggagaggucaaggguggaauuauauaguauggauauuugucucugcucaaaucucaug

SEQ ID NO: 392811 - RNA, 76 nt, Homo sapiens
ucauugugagagcaucauucaacaaaagucuugcaugucuugucaagacuugaccuugugagcguuuugcaaauga

SEQ ID NO: 392812 - RNA, 73 nt, Homo sapiens
ggacuggaaagaaucaggcuaaacucuugaguguaauugcuucugauguuuucacccuguuuuuucauaguuu

SEQ ID NO: 392813 - RNA, 62 nt, Homo sapiens
guucccaccuuguuuguucuguggcuuccaggagggaagacuuggaccagagagguggggac

SEQ ID NO: 392814 - RNA, 78 nt, Homo sapiens
gagcuggugccuuccaguggacuacuucauccuagaagcccucgggaugcacguuucacuggaagaaaggccuagcuu

SEQ ID NO: 392815 - RNA, 71 nt, Homo sapiens
ugcguccgugugaagagaccgccaaacaggcuuugugugagcaacauggcuguuuauuucaccugggugca

SEQ ID NO: 392816 - RNA, 72 nt, Homo sapiens
ucacuuagcagccuucaagcuccaagauguguuuauucuaaggccuugagcuaacuugaggcuggccagugg

SEQ ID NO: 392817 - RNA, 118 nt, Homo sapiens
gguuuucaaagugagucuuggaccaugauguuaaacuuuuguuuucccugagauuaauagcugucucaauuuagggcuuguuuaacuaucauuaauguccaaacucuccaacaaaacc

SEQ ID NO: 392818 - RNA, 68 nt, Homo sapiens
cuuaaggagguagucugucccuuagcagagcuugagugcugugcugggagauccacugcucucuucag

SEQ ID NO: 392819 - RNA, 57 nt, Homo sapiens
auguagguggucuaguuuguaggguccuuaaaacuaacauugcaugauuaccugcau

SEQ ID NO: 392820 - RNA, 77 nt, Homo sapiens
uucagacaggucacagccaaagcuuuagaccugggagauauccacagacccaugcauggcuguuaacacuguuugag

SEQ ID NO: 392821 - RNA, 82 nt, Homo sapiens
uacuuggcaaguugggggauuugugguccaaagucaucuuuacuuuuauuuggagcccuaguuccucauaacccaccaggua

SEQ ID NO: 392822 - RNA, 55 nt, Homo sapiens
gaaauuauuuucagaauggagaaggcaguugucuucaucagggagaaauaauuuc

SEQ ID NO: 392823 - RNA, 58 nt, Homo sapiens
guaugucaaggugggugauaguuuuagacccuucuaaaaauucaagacugugacauau

SEQ ID NO: 392824 - RNA, 94 nt, Homo sapiens
ugggaggaucgcuugagcccaggaugucgaggcuguagugagccgagaucacauuacugcauuccaaucugggcgacagagucgaauugucuca

SEQ ID NO: 392825 - RNA, 58 nt, Homo sapiens
agucauuguugagauggugucagccuguacuucagauggacacuaacucaagauggcu

SEQ ID NO: 392826 - RNA, 96 nt, Homo sapiens
uuuauuguagugaauauguuagaguguagcaggaagaggcaauauauucaauacuggucuuuuccuuuauuauuucacuuauauuuaagcaaugga

SEQ ID NO: 392827 - RNA, 67 nt, Homo sapiens
gcucuuuguaugucaugacaacugugccaauuauuuuuggcacaguucacuuuuuauaucaaagagc

SEQ ID NO: 392828 - RNA, 55 nt, Homo sapiens
uugagauggagucuugcacugucgcucagacuggagugcaauggugccaucucgg

SEQ ID NO: 392829 - RNA, 129 nt, Homo sapiens
uuuaaauaucacugcacuuaaugaagaaguauuuuugucucugacuagugugauguaguaaaugaaauuguucucauugauuauucaugcagucacugauucaauaaaucaguaguguaugcccuuaaa

SEQ ID NO: 392830 - RNA, 57 nt, Homo sapiens
uuuguaacaugcuuucacuucaguuaaagcagaaacugaugugauauaugugacaga

SEQ ID NO: 392831 - RNA, 68 nt, Homo sapiens
gauggcauggaaagcuuuucauaccgaggucugaacuccaagguguggagaccuuuccaccaaccauc

SEQ ID NO: 392832 - RNA, 74 nt, Homo sapiens
gccccuuguguaacaacagcacuccacugccccaucccugagcagagcgcuguguguugcagcagagugggggc

SEQ ID NO: 392833 - RNA, 74 nt, Homo sapiens
uggauucaccuaacuaguaguuucuugagaauuuuugcaucuauguucaucagggacacugguuuguaauuuca

SEQ ID NO: 392834 - RNA, 95 nt, Homo sapiens
aggcaacacauauuuuaaugcauauguuuggguguguauaugugugugugcauauguauauauguaaauauaugagaaaaugugauuuacugucu

SEQ ID NO: 392835 - RNA, 71 nt, Homo sapiens
cauugauuuugcauccugagacuuugcugaaguugcuuaucagcuuaaggagauuuuaggcugagacgaug

SEQ ID NO: 392836 - RNA, 55 nt, Homo sapiens
uugagguagugucuuguucugucacccaggcuggaguccauuggcacaaucucag

SEQ ID NO: 392837 - RNA, 85 nt, Homo sapiens
uggcauugccugccugagaaaauggagggcaacaggaugccaacacucagugccccguuuugucaggcagcuuuucugcaugcca

SEQ ID NO: 392838 - RNA, 59 nt, Homo sapiens
ucuauauggguuggggggaacagccaaauuuaauuuggcaauaaacuccccuaacugga

SEQ ID NO: 392839 - RNA, 58 nt, Homo sapiens
gucugugcauuaauacgugcuguguaaccuaacuucucagcauuauaaugucacagau

SEQ ID NO: 392840 - RNA, 58 nt, Homo sapiens
gguuuugacuugcauuucucugaugauuagugacauuuaggaaaugucuauuaagauc

SEQ ID NO: 392841 - RNA, 72 nt, Homo sapiens
uucaaagucucaugugccauugucuugucaauguguguaauagcuucagguaauagcacaugauaccuuggg

SEQ ID NO: 392842 - RNA, 74 nt, Homo sapiens
gcauuuuguaagucucucuuguuagacuggugaacaaaguggagaggugaggcaagaagagaguuuaaacaugc

SEQ ID NO: 392843 - RNA, 61 nt, Homo sapiens
aguuuuugaaugaacauugcuaugugguuauaaacugauggcaauggcauucauuuuaacu

SEQ ID NO: 392844 - RNA, 73 nt, Homo sapiens
auauguguugggcaguuuucuaugcugcaauuuaucgcaagaauagcagcaaagcaggaucugcucacugugu

SEQ ID NO: 392845 - RNA, 108 nt, Homo sapiens
uguuggcccuuccuggguccugaguuugcagaccuuuggacuggaacuauaccauuggcucuccugagucuccagccugcugguugcagaucuuaggauuugucagca

SEQ ID NO: 392846 - RNA, 94 nt, Homo sapiens
ccuggauuugcagcucuuucuucucuuguuccagagcaucuucaaacucaaugaauuucugugcauggaagggagggaaagagcagucaucagg

SEQ ID NO: 392847 - RNA, 60 nt, Homo sapiens
gucaauucuaaguaccucauauaaguggaaucacacaguauaugucuucuuguaauuggc

SEQ ID NO: 392848 - RNA, 70 nt, Homo sapiens
gccaucuugagcuuguugcuguuuccucgagucuugguuauuuguuauagccuguaggccuuaagguggc

SEQ ID NO: 392849 - RNA, 57 nt, Homo sapiens
gcuuggggcuccuguaagcaagaacucaaagguccuugagaggacagagccauaagc

SEQ ID NO: 392850 - RNA, 67 nt, Homo sapiens
uugcgaugaagacaaaacaugcucuuuaaauccauucacagagacauguguuucuuuucauuggcaa

SEQ ID NO: 392851 - RNA, 72 nt, Homo sapiens
aggaaugcuuuuacacuguugguggguguguaaauuaguucaacccauguggaagacaguguggcaauuccu

SEQ ID NO: 392852 - RNA, 89 nt, Homo sapiens
ggagaaucauuugaaaccaggaggugaagguuguggugagccgagaucacaccauugcacuccuuucugggcaacaauagugaaacucc

SEQ ID NO: 392853 - RNA, 65 nt, Homo sapiens
gccuuuggcauuugaguuuguaggaacaggccuauacauuccuacuguaaaauuccgccacaggu

SEQ ID NO: 392854 - RNA, 82 nt, Homo sapiens
cgagagccuuuguuacaaagugguuuauacaugauugagccugugcaugauguguucaagcuacuuuacggagaagcuuucg

SEQ ID NO: 392855 - RNA, 61 nt, Homo sapiens
aucucaguuaauuccaucuuuccagcuacacaugcuagaauccuuggaguuauacuuggau

SEQ ID NO: 392856 - RNA, 55 nt, Homo sapiens
gucuuuguuauuaugaaucaacauacaugugcauguuuguuuauaguacaaggau

SEQ ID NO: 392857 - RNA, 62 nt, Homo sapiens
uauuuuauguaauauaaguguaguuacuucugcugguuuuugcauugcacuugcaugagaua

SEQ ID NO: 392858 - RNA, 77 nt, Homo sapiens
ucacuugaaucugggaguuggagguugcagugagccgagaucgcgccauugcacuccagcuugggcaacaagaguga

SEQ ID NO: 392859 - RNA, 58 nt, Homo sapiens
agcuucauucugaauagguugacuaaacacacauauucaacaaguuacaggaggagcu

SEQ ID NO: 392860 - RNA, 58 nt, Homo sapiens
augccagacauuuacaaauguccuuuguugacuauggaaccauguaaauguuuugcau

SEQ ID NO: 392861 - RNA, 57 nt, Homo sapiens
uucaagucaaggaaagaggucugagaagaacaacucugccaucaccuugaucuugga

SEQ ID NO: 392862 - RNA, 65 nt, Homo sapiens
augauguugggauaacuggcuagccauaugcagaagauugaagcugggccccuuccuuacaucau

SEQ ID NO: 392863 - RNA, 103 nt, Homo sapiens
gcugggcaauguuuuaagugcuuucuguauauuuauuuaacucucauaacaaccuaugagguagguaugacuaucacagagaggcauagagagguuaacuagc

SEQ ID NO: 392864 - RNA, 69 nt, Homo sapiens
gacugggcuuagcagggucugaccucacuuggagucugguguggucagauggcagcugggccuggaguc

SEQ ID NO: 392865 - RNA, 58 nt, Homo sapiens
gucugcuaucuguggagauucacucagcugguuggugacagucucccgauggcuaggc

SEQ ID NO: 392866 - RNA, 70 nt, Homo sapiens
gugcucuaacccugaggggcuuggggaccaggccuauggcuuuguucucuggccucucaagguuaagcac

SEQ ID NO: 392867 - RNA, 60 nt, Homo sapiens
caggguaaaccuaugagauagcuguugcuauugacauuucuaucucaguguuuacauuug

SEQ ID NO: 392868 - RNA, 59 nt, Homo sapiens
uugauguugaggacauaaaccuuaggaaaugaucccuuccuguguguucuuaauuucaa

SEQ ID NO: 392869 - RNA, 59 nt, Homo sapiens
ggggauaagcacuguggggagcccgucauccaauguucaccacagccauuauugucccc

SEQ ID NO: 392870 - RNA, 88 nt, Homo sapiens
cagaauuucuacccguugaggguuugccagcagagucccuggguuacuacuuuuaucugagcuggcuaaacucuuaguggucauucug

SEQ ID NO: 392871 - RNA, 63 nt, Homo sapiens
ccuugaggucaggacagcuucagcaaggcacaggcacagcgguggaauguucugacuucaggg

SEQ ID NO: 392872 - RNA, 65 nt, Homo sapiens
auuaaggcgauuguuuuuuccucaagggcacuuccuugagggcugaauaccaaucagccugcgau

SEQ ID NO: 392873 - RNA, 117 nt, Homo sapiens
guuugcccuuccucagucauuuacaguuugccaugaugaaaugcauguuaaguccguguuucagcugaucagccugauuaaacacaugcucugagcagacuaaagcuaggggcaaac

SEQ ID NO: 392874 - RNA, 57 nt, Homo sapiens
uauacuucauaaagugcuaucagaugauuguuccauuugagauccacgugaaguaug

SEQ ID NO: 392875 - RNA, 74 nt, Homo sapiens
uuuuauuacaguagagaucagcaaacuaugucccauggguaaaaucuggucugccaucucuuuuuguaaagaaa

SEQ ID NO: 392876 - RNA, 63 nt, Homo sapiens
cucaucugugaaaggguuagauaagauucagugagauaaugugugacucuggcacauggugag

SEQ ID NO: 392877 - RNA, 91 nt, Homo sapiens
caugguagcguauaagucucgugagaacuaaugguuugauaagggguuuccccuuucaguugguuuucauucucucuugccugccgccaug

SEQ ID NO: 392878 - RNA, 70 nt, Homo sapiens
ggaggcugccagcuuacauuaucgggccaguggcugacauugucagcuagcauucaaaugugcagccuuc

SEQ ID NO: 392879 - RNA, 77 nt, Homo sapiens
ccugcugccccuacucugacauggggggcucgcaggguucacacacguggcccagcguucagggaggggcuuccggg

SEQ ID NO: 392880 - RNA, 60 nt, Homo sapiens
aguagcaucauuugcaauuucaugagcaguuagcauacugaaagaaugaaugauguuacu

SEQ ID NO: 392881 - RNA, 71 nt, Homo sapiens
auagcagagaucauucugauccagagucuuugaagcuuuaacaggguaccuggacggauugacuuagcugu

SEQ ID NO: 392882 - RNA, 56 nt, Homo sapiens
cugacuucuugcucauacuagcuguucuauucagaucagcuagugguaggagucgg

SEQ ID NO: 392883 - RNA, 71 nt, Homo sapiens
aauugccuuaaucacagugucuuccuucaaggaucuggauagaugagggaaaaacuguauuguucucaauu

SEQ ID NO: 392884 - RNA, 60 nt, Homo sapiens
uguuucauauaguagugguucuacccauccagauagacugaaucaccauuauuuggaaca

SEQ ID NO: 392885 - RNA, 64 nt, Homo sapiens
cuauguguccauguguucucaucauuuaacucccacuuauaaagugagaacaugugguauuugg

SEQ ID NO: 392886 - RNA, 79 nt, Homo sapiens
caagaugcccaguguguuguggauauuuaugucaacuacgacugugauuuaaaugcugcuaacauuuuugagcgccuug

SEQ ID NO: 392887 - RNA, 59 nt, Homo sapiens
uuuggcguguuauaguuggguuggguggcugugccucucccugaacaugacacaccaga

SEQ ID NO: 392888 - RNA, 56 nt, Homo sapiens
uuaagccacucaagagauagagcacuuccccuuugcucuguguuucagcugcuuga

SEQ ID NO: 392889 - RNA, 64 nt, Homo sapiens
gcuugaagcugagaggcagagguugcggugagccgagauugcgccauugcacuccagccugggc

SEQ ID NO: 392890 - RNA, 69 nt, Homo sapiens
ugcaugugggcagaacucggggaaggaaaaggcacugacuuggauugcacugagauuuugcuuacagca

SEQ ID NO: 392891 - RNA, 56 nt, Homo sapiens
ugaauguaagaugucugcuggucaucaguuacauaaucagcaaauauaaacauuca

SEQ ID NO: 392892 - RNA, 64 nt, Homo sapiens
auugugaauagugcugcaauaaacauacgugugcaugugucuucauagcagcaugauuuauagu

SEQ ID NO: 392893 - RNA, 76 nt, Homo sapiens
aguagaugauuguugagauggauagacauagcauuuaacuugaagaugcucuugucaauuuacuucuaccacuacu

SEQ ID NO: 392894 - RNA, 69 nt, Homo sapiens
augguggcugggauaggauucuacugucagcugucacuucucagugcauccauguucagcagucaccau

SEQ ID NO: 392895 - RNA, 58 nt, Homo sapiens
uggugggagugacguugccuucuaugcauagcaguguugcaaaguuuagcucccacua

SEQ ID NO: 392896 - RNA, 65 nt, Homo sapiens
augugagcuccuucauaaaaaggcacagaaugaugcaaauguaccuuuaaaagaaggguucacau

SEQ ID NO: 392897 - RNA, 61 nt, Homo sapiens
ucuauuuuguuaaccuuuucaaaaaaccagcuccugguggcuggcaagauggcagaauaga

SEQ ID NO: 392898 - RNA, 58 nt, Homo sapiens
guagucacuaaccacauguggcuuuugagcacuugauauaugugguuagcaugacugc

SEQ ID NO: 392899 - RNA, 85 nt, Homo sapiens
cuggacaaaagaucucugagaaauuucuuugugaugugcgcauucaucucacagaguugaacuuucuuuugauugagcaguccgg

SEQ ID NO: 392900 - RNA, 58 nt, Homo sapiens
gcagccgcaguggccacaucuuggagauugacugucagcgcauggucgugcggcaugc

SEQ ID NO: 392901 - RNA, 125 nt, Homo sapiens
gagaggaacuaacacuuuuugaggaagacuaauauguccaguguuuugggagcugucaagaucaaagacaacuucccugaccacuggauguaaaaagaucucccucccauaauuguuguccucuc

SEQ ID NO: 392902 - RNA, 60 nt, Homo sapiens
accuacauguuccacauaguuguagcuguaucuggguaucacugugcacauaugauaggu

SEQ ID NO: 392903 - RNA, 56 nt, Homo sapiens
ugcuccguuuuugaccggcacugaugccacaucacauagcugaguaaaauggagua

SEQ ID NO: 392904 - RNA, 62 nt, Homo sapiens
gccuuuaaggaacuugcacugugauaacauaugguagaaaauugcaaguugccuuuggaggc

SEQ ID NO: 392905 - RNA, 63 nt, Homo sapiens
aguuugccaguauuuuauugagaauuuuugcaucgauguucaucagggauacuggcuuaaacu

SEQ ID NO: 392906 - RNA, 55 nt, Homo sapiens
guggcgaaugccaggugcagaccaugugaccacgcguggcacuggcguaucccac

SEQ ID NO: 392907 - RNA, 69 nt, Homo sapiens
uucaguuuccuugagaaaggcacaaguuguuacuucugguaauuuugcuuuuacuuagaguggacugga

SEQ ID NO: 392908 - RNA, 72 nt, Homo sapiens
guucugucacaguuuuggaggccaguagucugaaaucagugccgcuggcccaggucaagaugugagcagggc

SEQ ID NO: 392909 - RNA, 59 nt, Homo sapiens
uaccccagguuucuagaauaauuccuuagcuauagggugguuagcaaagaaaccaggua

SEQ ID NO: 392910 - RNA, 60 nt, Homo sapiens
cuggaaacaggagacugggguuggugugaaaagcauuuagaccccuagaucuuuuuccag

SEQ ID NO: 392911 - RNA, 68 nt, Homo sapiens
uaauaaguacucuggaguaggccuaauuuacagaagcagucuugguuaucuacaccagagcacuguua

SEQ ID NO: 392912 - RNA, 60 nt, Homo sapiens
cuuugcccauucaggguuucuuggagcagccccuccacaguagucuugggaugggcaggg

SEQ ID NO: 392913 - RNA, 102 nt, Homo sapiens
gaauuuucuuuugggggauucuauauauucgggauuucaaccaccaaccuaucugguuuuucccgcugaaauguugggugauggaaucaggagagcagauuu

SEQ ID NO: 392914 - RNA, 95 nt, Homo sapiens
gauguugagaauuuuuucauaagcuuuuggacauuuggauuuucucauuugugaaguuucuguucaaauuguuugugaaguuccugcuugacauu

SEQ ID NO: 392915 - RNA, 111 nt, Homo sapiens
gaauucuacaaaaagaguauuucaaaauugcucugugaaaaguaaacuucaacucuguggguugaaaguaaacaucacaaagaaguuucugugaaugcuucugucuaguuu

SEQ ID NO: 392916 - RNA, 60 nt, Homo sapiens
gagaaugaugauuuuaaauuucacccaugucccuacaaaggacaugaagucaucauuuuu

SEQ ID NO: 392917 - RNA, 72 nt, Homo sapiens
cuaauuugguuauaguguaucuugaguaaaucaccucaaugagaauuuuagguuacauauaauccaaauuag

SEQ ID NO: 392918 - RNA, 56 nt, Homo sapiens
aaggcagaggaagggugaauucacucuccuagagcugaaacaucuauccucuccuu

SEQ ID NO: 392919 - RNA, 72 nt, Homo sapiens
caugauuaaagauguucucauuucauagguucuuauaucugaauuguaugagagugaaagcauuucugcaug

SEQ ID NO: 392920 - RNA, 100 nt, Homo sapiens
gauugucauggagagccuggugcuaggaguuuggacuuuauccauuauggaauggggaggucauuguaaggucuuaaaccaggcagggacauggucaguu

SEQ ID NO: 392921 - RNA, 61 nt, Homo sapiens
uucagcaguggccaguggaaauggaagaaaagaggauucuccccacaugaccugcucugga

SEQ ID NO: 392922 - RNA, 85 nt, Homo sapiens
gucaccauagauuaguuugcauauucuaggauuuuguaugaauggagucauacagucauacaguauguauucuuuuuugucuggc

SEQ ID NO: 392923 - RNA, 60 nt, Homo sapiens
uagugguucuccgaggaugaucaguguaaaucuagcaucagacauggaggaggauuauua

SEQ ID NO: 392924 - RNA, 100 nt, Homo sapiens
guaguguuguucacgaagaauuuuguuuuauuuucuucuguaauuccuuuuuuccccccggaguauaaugacagccagauucuucucuaucaucuacugc

SEQ ID NO: 392925 - RNA, 64 nt, Homo sapiens
auugugaauaaugccgcaauaaacauacgugugcgugugucuuuguagcagcaugauucauagu

SEQ ID NO: 392926 - RNA, 96 nt, Homo sapiens
guuguucaguggguuugcacgguggcguguuugucacuaggcgaggucaccgugccuagggacaaaccguccgaccuaauggagucgaggagcaac

SEQ ID NO: 392927 - RNA, 64 nt, Homo sapiens
ggacucugcugguuuuguucacugcuguauccccggagcccagaacagugcuuaguagauguuc

SEQ ID NO: 392928 - RNA, 128 nt, Homo sapiens
ccaucauaauuugaccccuccuuuauuggaguaugagguuucagguucauuugcugcuauucauaccacugugcaauguagucauuggacagacuucucgcucuuccuauauguuuaucuauguaugg

SEQ ID NO: 392929 - RNA, 82 nt, Homo sapiens
ggauagauuguaagcauuugcgaguaguguugauauauuuuaauuugugagucaccaguacuccaaauugaggcggucaucc

SEQ ID NO: 392930 - RNA, 97 nt, Homo sapiens
gggagauaucagugauucagguauugcuauuucugacuuaagagauaaaaugauaguaacacauugaacgaucgcuagauacgaaaugaccccuccc

SEQ ID NO: 392931 - RNA, 65 nt, Homo sapiens
guauugcacauggcaggugcucaauuauuacugaaugaauaaggaagccuggauuauugcaauau

SEQ ID NO: 392932 - RNA, 65 nt, Homo sapiens
cccaguguuacgugacagccuguagcuuuuuagucaucacugucaggcuuuugcauagcacuggg

SEQ ID NO: 392933 - RNA, 108 nt, Homo sapiens
ggcuccauaaccagugaaggaugaugaaaugguuuuacugcaaaaugggaggggguucccccacugcugucucccaagguuaaaccccuuacucauccaggaggagcc

SEQ ID NO: 392934 - RNA, 55 nt, Homo sapiens
cucuuugaggugagcugcccaucggagccuuccgggagucucaccugacaaggag

SEQ ID NO: 392935 - RNA, 66 nt, Homo sapiens
ggggccuaguggaagguaauuggcuaaugagagcuaaguuuucauuaauggguuagcuucagcccc

SEQ ID NO: 392936 - RNA, 68 nt, Homo sapiens
ggguacaugugcacaacaugcaguuuuguuacauauguauacauguaccauguuggugugcugcaccc

SEQ ID NO: 392937 - RNA, 57 nt, Homo sapiens
uugccagccugcaaauaacuggccucccagucaguuuguauuucagguugcaugcag

SEQ ID NO: 392938 - RNA, 58 nt, Homo sapiens
gggcaacauugaguacccugaacuugucaagaagcuaacagggucugcuucugugcuc

SEQ ID NO: 392939 - RNA, 68 nt, Homo sapiens
uucuucuuaauguccugggaacuaucugugcagacuaagaauaauuuguuccuuaggcauuggaagaa

SEQ ID NO: 392940 - RNA, 66 nt, Homo sapiens
uaugaugaaagauuuccugagcuagaaauauccuaugauuuucauagcaagagguguugaaucaua

SEQ ID NO: 392941 - RNA, 88 nt, Homo sapiens
ggggaauggggcuggcagugugugaggaauuugggugcaggucccgggugaugaugacccaagucacggcugcuuucccccuggccuc

SEQ ID NO: 392942 - RNA, 108 nt, Homo sapiens
gauucuuagaccaggaauauuugcucacaaucaauuaucaaucacuuaauauauaucugauaauguuugauugagcagauagauaugccagguuuccuagagagaguc

SEQ ID NO: 392943 - RNA, 66 nt, Homo sapiens
gucagugccugucccaggcuuugaucagcuucauucauucagucagugccugucccaggcuuugau

SEQ ID NO: 392944 - RNA, 90 nt, Homo sapiens
ugacuugcagcagccuaugguacucucuugucugcaaauuuucugcccugauuaauuacaaagagugccagaguguguugacguuaguua

SEQ ID NO: 392945 - RNA, 64 nt, Homo sapiens
uucaguuugccaguauuuuauugagaauuuuugcauugauguucaucaaggauauuggccugaa

SEQ ID NO: 392946 - RNA, 88 nt, Homo sapiens
ggaggaucgcuugagccugggaggcagagguugccaugagcagagauugcgccauugcacucuagccugggcaacacagcgagacucc

SEQ ID NO: 392947 - RNA, 93 nt, Homo sapiens
gaugccugccacuccugcgccaugcacucgcauuccucagcccuuggguggucgaugggacugggugccguggagcaggggguggcgcucguc

SEQ ID NO: 392948 - RNA, 127 nt, Homo sapiens
guguugguuauaugauguuuuccauucugaggauuuugccuuuuuaaaaguauaggccuggcauaaauuugaagaguauaggccuggcauaaauuuuuauguaaagauuaaggguggugauuaauau

SEQ ID NO: 392949 - RNA, 62 nt, Homo sapiens
uuuguacacgugggugaauuguuuuaggauucaaacuacuaccuauucaacauguguccaga

SEQ ID NO: 392950 - RNA, 59 nt, Homo sapiens
auccucaguggcuuaaguauaguuauuaguuaaggcugugguuaaguuuagcugaggau

SEQ ID NO: 392951 - RNA, 59 nt, Homo sapiens
uguccaggcagaaguucgcugcagggguggagcccucauggagaacuucugcuagggca

SEQ ID NO: 392952 - RNA, 76 nt, Homo sapiens
ggugcaaggaugcuuggcccacccugagaggcguaauucgcccaucaacauugcugucaggcaucuuuuuagcacu

SEQ ID NO: 392953 - RNA, 74 nt, Homo sapiens
guagagaugaggucucacuauguugcccaggcuugucuccaacuccugagugcaagugauccucccaccucugc

SEQ ID NO: 392954 - RNA, 123 nt, Homo sapiens
ucugggggacaauuaccuguauaauagguucuauagauaauuuuuagauggaauuuaacuuguaaccucuguacugccaaguuucuuuagaggaccuauuuuuucauuccuuuguuuuccaga

SEQ ID NO: 392955 - RNA, 62 nt, Homo sapiens
guuagggggaauucucuccucaguguuuuggaauaauuucaggagaauugguucuucuugau

SEQ ID NO: 392956 - RNA, 88 nt, Homo sapiens
ggagaauggcgugaacccgagaggcggagcuugcagugagcugagauagcgccacugcacuccagccugggugacagagccagacucc

SEQ ID NO: 392957 - RNA, 57 nt, Homo sapiens
ucagucauucaauuguugaaugccugucauguguaggcauuaagaauaaaaugcuga

SEQ ID NO: 392958 - RNA, 56 nt, Homo sapiens
cugugcacacacuuggcauuugcuuuuuguaugcagaugucagaguguggguacgg

SEQ ID NO: 392959 - RNA, 57 nt, Homo sapiens
aaagguaguacuucuagaagggaggcgaucagaguccaauuaggagauauuacuuuu

SEQ ID NO: 392960 - RNA, 56 nt, Homo sapiens
cugacuuaugcaacucugaugugcagucguugcaccagagcucucugcaagguuag

SEQ ID NO: 392961 - RNA, 91 nt, Homo sapiens
caggguuuugcucuguugccuaggcuggagugcaguggcgugaucucugcucacugcagccucugccucucagguucaagcaauucuccug

SEQ ID NO: 392962 - RNA, 67 nt, Homo sapiens
agugguaagaguggaaauccuugucucauuccaguucuuagagaaaagcuuucaacuguuugccauu

SEQ ID NO: 392963 - RNA, 77 nt, Homo sapiens
caugugucagcaucaccaugucuaugauagggcaaaucaggucauugguguauggugauagcauaugauaucacaug

SEQ ID NO: 392964 - RNA, 70 nt, Homo sapiens
gugugugguaagaucagaacuggaguccagcucuacugacuucuagacuugagugauuucuaucauauac

SEQ ID NO: 392965 - RNA, 78 nt, Homo sapiens
gcuuugcuagagcugguaaaauggaaccaaaucgccucuucaauggauuugguccccuucaaccagcuguagcuaugc

SEQ ID NO: 392966 - RNA, 77 nt, Homo sapiens
aggcuagaguaguggcgugaucucggcucacugcaagcuccgccuccugagcucacgccauucuccuuccucagccu

SEQ ID NO: 392967 - RNA, 69 nt, Homo sapiens
uucugcaauuguuuauuucuucagaauuguugguuucucagcagcuuugaucugaaugauuuuguggaa

SEQ ID NO: 392968 - RNA, 73 nt, Homo sapiens
ggauuugguuugccaguauuuuauugaggauuuucgcaucaaucuucaucagggauauuggccugaaauuucc

SEQ ID NO: 392969 - RNA, 123 nt, Homo sapiens
gcaauguuugaaaguucuaguagaugcuguuuguggaaugcccuuauuuauggugauacaaacagcagcuacuagguaaguacguuccacaaacagccuucuucuagaacuuuuaaacauugu

SEQ ID NO: 392970 - RNA, 60 nt, Homo sapiens
uguguuauuuugcugggaaugaugguuuccaacuucaucugugucccugcaaagaacaua

SEQ ID NO: 392971 - RNA, 70 nt, Homo sapiens
ggucugcauugaagaaaaagaaaugaauguguugagaacgacuucauaguauuuuucuccaaauaagacu

SEQ ID NO: 392972 - RNA, 67 nt, Homo sapiens
cuccuuacuguacaccuacagaaaaggagaguugguggaggcucuccuguagguguacaguaaggag

SEQ ID NO: 392973 - RNA, 90 nt, Homo sapiens
ccucucacugacagcauuauccugaacgugagaguuuucuuuugcuuagaugaggugauuucuguucggguuuagcuguuuugugugagg

SEQ ID NO: 392974 - RNA, 68 nt, Homo sapiens
guuagcuaguagacaauuuuccugaaagcccugugcaaauauauucagagaaaaugggagcagcugau

SEQ ID NO: 392975 - RNA, 91 nt, Homo sapiens
uggcauagaugaggagcuuaaagcuagcgcugcuuggaaggauuuuuaaaaaucuacagccagucugguuuguagcaucgguuuagggcca

SEQ ID NO: 392976 - RNA, 60 nt, Homo sapiens
cucuuuaaaaaggaugcacuuugacauuuuaaaauaucuaugugcauaguuauuaaagag

SEQ ID NO: 392977 - RNA, 98 nt, Homo sapiens
accaccaaagccuccacagccuuagcccagaccucuguaauaguuaccuuaguaauucacgagguuaggaguuaaaggcuugguuugcuauugauggu

SEQ ID NO: 392978 - RNA, 66 nt, Homo sapiens
gccaggcaaaggcuuccacugcauccuuccaggcauguggaggauaaacacggagcuuccccuggc

SEQ ID NO: 392979 - RNA, 111 nt, Homo sapiens
acuuccugcucuucugugucuuuuauuucguuuguaauccuuacagcaucucuagugcaguggaugauaauaaaugcugaugaaaagaaacccuucacaagcuaaggaagu

SEQ ID NO: 392980 - RNA, 66 nt, Homo sapiens
cuuuugacuacugaugguguacgcgugcccuggcagggauggccauugugcugucaguaucaaggg

SEQ ID NO: 392981 - RNA, 65 nt, Homo sapiens
ggggucggggcauagccacuuacugacgacuccccacccagcaagugguuuugaacccggacccu

SEQ ID NO: 392982 - RNA, 78 nt, Homo sapiens
agugagucacaggucauccuggaucaaggugcaggaaacagacucugccuccuugugcaggaauggccugugcacauu

SEQ ID NO: 392983 - RNA, 63 nt, Homo sapiens
accuaacuaugucaaauaaaaugagggcaaagaauugacccuuggaauuagcauagauuaggu

SEQ ID NO: 392984 - RNA, 99 nt, Homo sapiens
gagauggggggaucacuugaggccagaagugugaggcuacagugaccuauaauugugccacugcacuccugccugggugacagagugagucccugucuc

SEQ ID NO: 392985 - RNA, 55 nt, Homo sapiens
cccagagauggaggcuguagugaaccgagaucacacuacugcacuccagucuggg

SEQ ID NO: 392986 - RNA, 69 nt, Homo sapiens
cugccuggguuuuguccucaggaggagucuguguugcucagacauauucggcaaaugcccuuuaggcag

SEQ ID NO: 392987 - RNA, 80 nt, Homo sapiens
aaagcuugcugugguagaaaguaccaaacuagaaacaaaaauauuuauuuucuaguuucuauuucagcauuuacagcuuu

SEQ ID NO: 392988 - RNA, 64 nt, Homo sapiens
guaucuauuaaaaguuuuugcuuugugguuaccacaaggcaugcaaagaacauuuuaugguuac

SEQ ID NO: 392989 - RNA, 57 nt, Homo sapiens
gaggcuggaggguuccaggaggccaccccaccaaggcugccugacacucuuugcuuc

SEQ ID NO: 392990 - RNA, 61 nt, Homo sapiens
uuauuuuuuagucagucuagcuagagauuuauuaauguuuagcugaucuuuuaaagaauga

SEQ ID NO: 392991 - RNA, 66 nt, Homo sapiens
uaaacauuuuggauuaugucuucuugauugauugaaugcuuugucauugugacaugaucuuguuua

SEQ ID NO: 392992 - RNA, 99 nt, Homo sapiens
caacuuucagacuaaaauauauaugcauauuucugaaagauuucauuucucaugaaguguucugugagaugucuauuucagagauguuuuguaagguug

SEQ ID NO: 392993 - RNA, 87 nt, Homo sapiens
gguaaauuucuuaaauaaugugaacuucuguuucuucaaggcaaguuuguuacagcugugacuugaaacgugaacagaucauuugcc

SEQ ID NO: 392994 - RNA, 118 nt, Homo sapiens
gaggcugcucacuccauuuggggaaguuuuagccauaggaaguuuucuugcugggccuggaucuguuuuucagagccacacagaaagauuuuccuuucccuacuuggggucuggccuu

SEQ ID NO: 392995 - RNA, 72 nt, Homo sapiens
uacauguauagauuccauaguggugaagacuggacuuuuaguguaaccaccaccugaauaauauacauugua

SEQ ID NO: 392996 - RNA, 87 nt, Homo sapiens
cagcgugggaccacaugaccgcucaccuccucaucuuccagaaggaccaggagcacaauggucauguggaugggguucccaaugcug

SEQ ID NO: 392997 - RNA, 82 nt, Homo sapiens
uagccuuugguuuaagggaauguuguagcugguuugaucuauccagaccacuguaacuuucucuacauaagcgauaagguug

SEQ ID NO: 392998 - RNA, 64 nt, Homo sapiens
auugugaauagugccguaauaaacauacaugugcaugugucuuuguaguagcaugauuuauaau

SEQ ID NO: 392999 - RNA, 67 nt, Homo sapiens
guacauagucacacauauacauacaugugaaaauacucauuuaagguuuguguguguuuaccugugc

SEQ ID NO: 393000 - RNA, 64 nt, Homo sapiens
uucgguuugccaguauuuuauugaggauuuuugcaucgauguucaucagggauauuggccugaa

SEQ ID NO: 393001 - RNA, 76 nt, Homo sapiens
ucgcuugaacccaggagcuggagguugcagugagccgagaucgcgccauugcacuccagccugggugacagagcga

SEQ ID NO: 393002 - RNA, 74 nt, Homo sapiens
cagagcuacaucacuguuugauugauugauugauugacugacugauugauugauugaaacagggucuugcucug

SEQ ID NO: 393003 - RNA, 59 nt, Homo sapiens
augagauacuacaaaugaguuuccgguuuccggauccaaucaccuuuguugguauucau

SEQ ID NO: 393004 - RNA, 74 nt, Homo sapiens
gguguuauggugugguguuugaguagugucuaucagaacaaauacagauuuuacacaucaccgcucguguuacc

SEQ ID NO: 393005 - RNA, 67 nt, Homo sapiens
gccaaugccuggcaugcaugcauucauucauucacugauaggauuuugcuauguuguccaggcuggc

SEQ ID NO: 393006 - RNA, 61 nt, Homo sapiens
guguaaccauauauuucagaguuaucucacucagagggugagggagcuggaauauuuauac

SEQ ID NO: 393007 - RNA, 127 nt, Homo sapiens
ucacagagccucuuaacacuuccaccugaaggugacucaaguugcuccugcucaugguucauuggacaaaaaggaucacagagucacgggcaacuucucuguuucuggaaggggaaccaaaauguga

SEQ ID NO: 393008 - RNA, 84 nt, Homo sapiens
gcugggauuacaggcgugagccaccgugcccagucgaaagugaaccuuucacugggugugguggcucacgccuguaaucccagc

SEQ ID NO: 393009 - RNA, 76 nt, Homo sapiens
aucuggcaacaucuggggacauguucaguggucauaacuggcauccagcgaacagaggccagggauguugcuagau

SEQ ID NO: 393010 - RNA, 65 nt, Homo sapiens
ugguggauguuaaguauucucaccacaaaaaugauagcugugugagguaguuaaugcauucacua

SEQ ID NO: 393011 - RNA, 55 nt, Homo sapiens
auggcuuuguguucagagcugagagaucgaucaaagcaugaacucauugagcugu

SEQ ID NO: 393012 - RNA, 63 nt, Homo sapiens
cuauguauccauguguucucaucauuuagcucccacuuacaagugagaacaugugguauuugg

SEQ ID NO: 393013 - RNA, 130 nt, Homo sapiens
uggguaaauuaagucccagccuugacagaguuggcugaaagagguuuuagugagucccacugaggucuuaucggugggaaggguuggaaccaccucagcucucuugucaagucaguaggaaauuuaucca

SEQ ID NO: 393014 - RNA, 58 nt, Homo sapiens
ugagacggagucucgcucugucgcccaggcuggagcgcaguggcucgaucuccgcuca

SEQ ID NO: 393015 - RNA, 66 nt, Homo sapiens
ucucgagaguuccagugacuguugcaaaugccuuuaacucuucagcucacugugaacuucuugagg

SEQ ID NO: 393016 - RNA, 65 nt, Homo sapiens
gaguuugcaguugguuagaacuggauggagagacccagcuucagaucaucccagcuccacuacuc

SEQ ID NO: 393017 - RNA, 92 nt, Homo sapiens
gcuuuuugagcuugauuuccugguggaccguccuagggucaccuggccagaagguaguacccagugguuacauaaggaguaagucggaaggu

SEQ ID NO: 393018 - RNA, 107 nt, Homo sapiens
caagauaucccuguaaagcauugcuaugguuuuggaauccugcagauaaaauggaaugucuucagguguuugaaaaucugggucauaugucucuacuugggaacuug

SEQ ID NO: 393019 - RNA, 60 nt, Homo sapiens
gagaaugaugguuuccagcuucauccacgucccuacaaaggacgugaaaucaucauuuuu

SEQ ID NO: 393020 - RNA, 64 nt, Homo sapiens
guguggguagaugaauccauuccaaggcccaagguaaauauucagccuucauccuaccucauac

SEQ ID NO: 393021 - RNA, 65 nt, Homo sapiens
ccugauuguagagccccagggcuucgagugaccauaggugguagccagggagugguugcagcagg

SEQ ID NO: 393022 - RNA, 130 nt, Homo sapiens
agcuaucauggcauuccugggauaacuuguucauauugugcugucuuugugaugugcuguuggauuuguuagcugguauuuugucgaggacuuuuguaucuauguucaucagggauauuggccuguaguu

SEQ ID NO: 393023 - RNA, 67 nt, Homo sapiens
aguugagauaucuuggccuuugcaugacgucaacuacaaguggugcugggagcuuggugucacagcu

SEQ ID NO: 393024 - RNA, 84 nt, Homo sapiens
cuagggccacauagcuagucaguagugaagccuggauccaaacccagaucugucugucugcacagcucaugggaaaaacccuag

SEQ ID NO: 393025 - RNA, 76 nt, Homo sapiens
uuuaugacuugauacauguuuuugaacagcaacaaccuaaguuaaagugacuuuaaaaaauguacucggucauaga

SEQ ID NO: 393026 - RNA, 60 nt, Homo sapiens
gggagggaggagccccggccauccccacccucguggauguaacugguuuucuucccucuc

SEQ ID NO: 393027 - RNA, 61 nt, Homo sapiens
uuucuauccuguauacuuucaaauucagaaaaaaaggaaagugacaguuaagggauagaag

SEQ ID NO: 393028 - RNA, 58 nt, Homo sapiens
ggaaacugagauucaaagagguucagugucauaucuggccaagauaaucucaguuuuc

SEQ ID NO: 393029 - RNA, 71 nt, Homo sapiens
aauaaagcaugaggcauuuaucauuucaugagucaucuugacauaaaaggauaaaugccucaugcuuuauu

SEQ ID NO: 393030 - RNA, 99 nt, Homo sapiens
gaggcaaggaaauuguuugagccuaggagguugagagugcagugagccguguugcugccacuguacuccagccugggcaacaggacaagaccgugucuc

SEQ ID NO: 393031 - RNA, 75 nt, Homo sapiens
ggucguguuauugaaggacauucuaugguagaugagucccucaucacagguauguucuuucaaaggaucaugacc

SEQ ID NO: 393032 - RNA, 68 nt, Homo sapiens
gcugaacuguuucuggugaaagaguagccuuccuucgcgggcacugacacugagggaagcagcucagu

SEQ ID NO: 393033 - RNA, 112 nt, Homo sapiens
uugaauaaaagauuauacagcuucuagaagugauaauguuaggcuuuauucauuauauauggcuggauaaauuacuugauuuauuguauuuggucuguuaacauuuauuugg

SEQ ID NO: 393034 - RNA, 82 nt, Homo sapiens
cguguguguguguguguguguauauauauauauauaugucuacauauacagguaugugucuauauacauguauacauauaug

SEQ ID NO: 393035 - RNA, 77 nt, Homo sapiens
guauccccucagcuuuuguuugucuaagaaauauuuuguuguuucuucaugcuugaaauaauagcugugcaggguac

SEQ ID NO: 393036 - RNA, 62 nt, Homo sapiens
gugagaugauggguauguuaauuugcuuuacuauaguaaucauuugacuaucuauaucucau

SEQ ID NO: 393037 - RNA, 60 nt, Homo sapiens
cucauuaguuguuuuaagaugacucuugcugcagcuaccaucuuacagcagcuauaugag

SEQ ID NO: 393038 - RNA, 58 nt, Homo sapiens
ccccugaugucuagcugaauucaguggagacuuauaaagguagcagacaucauugggg

SEQ ID NO: 393039 - RNA, 66 nt, Homo sapiens
gcauccguugcaagggaagaaugaagacaaaaaucaucuacuguuuucaaccaugcacaugggugu

SEQ ID NO: 393040 - RNA, 108 nt, Homo sapiens
gaucccuucccagugaguguagguagaacaugugaaugugaucggauagucacuucugugauuauaaugcauuauaugggacuccacucuaacacauuaggagggauu

SEQ ID NO: 393041 - RNA, 58 nt, Homo sapiens
aauacuuacugaguugugaggaccuguaagaaaggucacagcacuuuuaguaaguguu

SEQ ID NO: 393042 - RNA, 67 nt, Homo sapiens
cuggugugugacuuuucauuauggggucaaacaaaggauuccucaguaaugucaguagcaucacuag

SEQ ID NO: 393043 - RNA, 83 nt, Homo sapiens
guucagcuuaagacuuuuugcauuuuugauuguugaaacauuguauuagucaugaaauguaugagucuggguucuuugugagc

SEQ ID NO: 393044 - RNA, 60 nt, Homo sapiens
uugcugagucuuucuagguugcuguugauguaagcaguggccaggcugagagcuuagcag

SEQ ID NO: 393045 - RNA, 115 nt, Homo sapiens
gaaaggcuucgugacaaaaccaaggugcggagggccguugggagggcuugaaggaaaccccauuggucucugauuucacagcugucuuccgucucggucugcaacccugucuuuc

SEQ ID NO: 393046 - RNA, 82 nt, Homo sapiens
gugcaaaaauuuguuuucaagucacuggacauaaggcaaugaaauauaaugaucccugagugauugaaaauaaaggaaguac

SEQ ID NO: 393047 - RNA, 108 nt, Homo sapiens
guguagauuucagauggucaaggugccaugagggagggguggugccgcacaacagugcugucauucauccuuuccuuucagcaucuuaugacgguuugcaguuuauau

SEQ ID NO: 393048 - RNA, 79 nt, Homo sapiens
uuuucaguaguaaauggauuuggaagucugagauauuuucaaauacauucuuggguuuuuaaaauuuauuaccagaaaa

SEQ ID NO: 393049 - RNA, 59 nt, Homo sapiens
ggcaaguugcuuaaccucuccagaccuauaagaggaagagguuuaaucaggcaguugcu

SEQ ID NO: 393050 - RNA, 59 nt, Homo sapiens
uucacugugaauaaaggcucccaaugaauucucaugaguuuuuaauggucauagcugag

SEQ ID NO: 393051 - RNA, 81 nt, Homo sapiens
uuuauucaaacucuuuguuuuccgaagauacauggaauacaaagcccgaagcugguggagagcaaagaauuuguuaguaaa

SEQ ID NO: 393052 - RNA, 59 nt, Homo sapiens
uggcaacuugcaaccucauucucauggaagagauaauaggggaugauguaacuaugcca

SEQ ID NO: 393053 - RNA, 64 nt, Homo sapiens
cccuuguugcacugcuuuccuggcccuggaggaggcagggcugggaggaaagugcuggcagggg

SEQ ID NO: 393054 - RNA, 57 nt, Homo sapiens
ucucacagaguugaauguuucuuugauugagcaguuuugaaacacucuuuguguaga

SEQ ID NO: 393055 - RNA, 66 nt, Homo sapiens
ugcuugauuaagccuuguuugcaaaaucaaauaucuacagaugugggcaagaaacacaaucaagua

SEQ ID NO: 393056 - RNA, 58 nt, Homo sapiens
uguggagcuguguggccuugggcaagugacuuaacugcucugagucucagcuaccaca

SEQ ID NO: 393057 - RNA, 64 nt, Homo sapiens
auauugaacacagaguagcuuuccaaacccauggaguauggauccgcuuucccugugucaauau

SEQ ID NO: 393058 - RNA, 59 nt, Homo sapiens
auuuuaggguuggaucuuuauuaauaugcaauaucuaugagguaucugagcccagaaau

SEQ ID NO: 393059 - RNA, 57 nt, Homo sapiens
gaggagugaauuguaugcuguaaagugguacauuuuauggcguaugaauuauaucuc

SEQ ID NO: 393060 - RNA, 57 nt, Homo sapiens
uucagugguuauuugugagauuuggguguacccaucaccgaagcaguaaucacugaa

SEQ ID NO: 393061 - RNA, 97 nt, Homo sapiens
uugcaaugugagaaguacaugagauuugggagggggcagggguggaaugauaugauuuggauuuguguccccacccaaaucucauguugaauuguaa

SEQ ID NO: 393062 - RNA, 92 nt, Homo sapiens
ucauaucacaggguguacacccacugugauauuaaaaggaauaucuuucuagaacauuacaaauaguaucacaagguguacacccacuauga

SEQ ID NO: 393063 - RNA, 58 nt, Homo sapiens
gaggggcagguaccaagacuagaaaggcaccuggaaaggguguuugguucugcgccuc

SEQ ID NO: 393064 - RNA, 61 nt, Homo sapiens
acuaguaccauucccaaaccaacugaaacacauucuucaauggcaaggucauggugcuggu

SEQ ID NO: 393065 - RNA, 68 nt, Homo sapiens
ucacauggacacugguggauauggaauggcuuuuuucugcgcaauucacauccgaccaggucaaguga

SEQ ID NO: 393066 - RNA, 111 nt, Homo sapiens
uagaagaaaauuaaaccucaauugaaacaugagagaauagugcuguaacauaaacaguaucucuuuuuuguggcaccaguuuuucagugauucaaaggaagaauguuucua

SEQ ID NO: 393067 - RNA, 67 nt, Homo sapiens
uaccaaguauuuucacaugaacaggguagguuuuauauuaacccauuuuucauaugaagaacuggua

SEQ ID NO: 393068 - RNA, 59 nt, Homo sapiens
cucuucacaugguugccuuuugaucuuucagagcucagaguagcugugcugacuuagag

SEQ ID NO: 393069 - RNA, 75 nt, Homo sapiens
cauuauauuacagcacuguuaaagauacugaaauauauugaaguuuuaccuugacauugcuguaguguccagaug

SEQ ID NO: 393070 - RNA, 58 nt, Homo sapiens
gaaaggauuugaaaaaguugcaggaaacgaauuuaugccuguaccagcaagucuuuuc

SEQ ID NO: 393071 - RNA, 56 nt, Homo sapiens
uuaugucacuguucagucucccucaaaacagugagcaggucugaguggugacgugg

SEQ ID NO: 393072 - RNA, 62 nt, Homo sapiens
cuccagggauucagauaucaauauaccacaguucguucuuucuggaguuugaguucuuggag

SEQ ID NO: 393073 - RNA, 129 nt, Homo sapiens
gccaugguuaauucagggacuaugguggucuugucugugggcagcaucuaugguccacaggaagcugaaaagguaagccaagaugcugcccacagacaagaccaccauagucccugaauuaaccauggc

SEQ ID NO: 393074 - RNA, 67 nt, Homo sapiens
cguguggucaguguuaucaccgaaggaaaauguggugcuuuuccuuggguggacgcugaucaauaug

SEQ ID NO: 393075 - RNA, 73 nt, Homo sapiens
gugaauguacuuaacacuggauugugcauuuaaaaaugaagaagguuguaaguuuucuguuuuguacauuuac

SEQ ID NO: 393076 - RNA, 83 nt, Homo sapiens
agcaugaagcgguguugaauuuuguugaaggccuuuucugcaucuauugagguaaucauguggucuuugucauugcuucuguu

SEQ ID NO: 393077 - RNA, 106 nt, Homo sapiens
ggaaaaaaaaaauguguuaauacaucuauaaacugcuugaaauggugucaggcagauacgucuuauaucaguauuguuguuguuuuagauguguggacugaguucc

SEQ ID NO: 393078 - RNA, 80 nt, Homo sapiens
gaauuuagcugugagguaugugggcagacauuuagagucgcuuuugauguugagauccacaugagaacacacaaagauuc

SEQ ID NO: 393079 - RNA, 78 nt, Homo sapiens
uacucuugucacuguuuccuauuauauuugggugauucaguauaacagaagaauguaauaggaaacguguggagggug

SEQ ID NO: 393080 - RNA, 73 nt, Homo sapiens
gguaauauuggcagaauguuagaaacuuaaacaguucaccuuagcuuagguuagauauucucccacuauugcu

SEQ ID NO: 393081 - RNA, 57 nt, Homo sapiens
ccuggauucaaaauggcaugauucuuuuagaaccgagucauacuguggaguaccagg

SEQ ID NO: 393082 - RNA, 92 nt, Homo sapiens
cuuucuauuguggaaaauaauaagagagacauaaauugcagugaacuucccauuauuguucuuguguccuuuuccuccacauuauacgagag

SEQ ID NO: 393083 - RNA, 60 nt, Homo sapiens
cuuuggcaagauuguguggcugaaguaauauuaguuuucuuccuauguaucuugcugggg

SEQ ID NO: 393084 - RNA, 89 nt, Homo sapiens
gcaccgucccaggagccacaguccacaucuccugcccacccugugaggugugagucagucuguguagggcugggcuugguagacagugc

SEQ ID NO: 393085 - RNA, 56 nt, Homo sapiens
cccgggagguggaaguugcagugagcccagauugugccauugcacaccagccuggg

SEQ ID NO: 393086 - RNA, 89 nt, Homo sapiens
uaacaggugugaaguaauguuuuauucuauuuuguauuugaauuucucuggugauuaaugauauugaacaucuuuucauauaccuguug

SEQ ID NO: 393087 - RNA, 130 nt, Homo sapiens
cucuaugggaucacccucuuuugcaucugacugaggcaagccuuaaagaucaagccgaugucagagcagaggaacugcuguuugguaaggaugccucagagaugaaaaggggaggaggguggucucagag

SEQ ID NO: 393088 - RNA, 105 nt, Homo sapiens
guguagccgcucauguccucuuucagugccuggaagucgugcuucaggucaugacccaccaccagcuugccuuucaggagcugcaggaucuggccaggaagacau

SEQ ID NO: 393089 - RNA, 68 nt, Homo sapiens
ccugucugauguugaccucaaagccauaaauggguguuugcgacuucugaguuaaugucagcugcagg

SEQ ID NO: 393090 - RNA, 77 nt, Homo sapiens
caggcacccaccaccaugccuggcuaauuuuuuggacgggguuucaccgaguuagccaggauggucuugaucuccug

SEQ ID NO: 393091 - RNA, 72 nt, Homo sapiens
uggagugcagugugauguuuuaaucuauguauacaucauagaaugauucagucaugcuaauuaacacaucca

SEQ ID NO: 393092 - RNA, 83 nt, Homo sapiens
gcugcaugugcuuaaaaaugcagagaacaaugcugaacuucaggguuuagagguagauucuuggaucauugagcacauucagu

SEQ ID NO: 393093 - RNA, 103 nt, Homo sapiens
aucaugugguuuuugucuuuggcuguguuuauaugcuggauuacauuuauugauuugcauauauugaaccagccuugcaucccagggaugaagcccacuugau

SEQ ID NO: 393094 - RNA, 80 nt, Homo sapiens
augagauguuuugauacagguauacaaugcauaauaaucacauuagaauacaugggguaucugugaucucaagcauucau

SEQ ID NO: 393095 - RNA, 75 nt, Homo sapiens
gagaauguggcaggaggugaugcuuggggacuucgaagcuacaucaucaaaagcaacacaucugccccgguucuc

SEQ ID NO: 393096 - RNA, 61 nt, Homo sapiens
caauguaaauuguggcucccaacugugccuuccuccaccguaacaagccaccauuuacuug

SEQ ID NO: 393097 - RNA, 78 nt, Homo sapiens
acugaaagugcuguccuaccuuugggaaauggaggccucguuucuccagcuuuuauuaggaaggacagccugaacagu

SEQ ID NO: 393098 - RNA, 83 nt, Homo sapiens
uagucuccuaucugguaaguggcagagcaggguuuugaaaccaaaaucuggguuuuuccauugccgguuuugggcuuggacua

SEQ ID NO: 393099 - RNA, 63 nt, Homo sapiens
ccauggcaugaucaguuuugcuauuuaaagcaaaaaaugcucuagcuacacugugauucaugg

SEQ ID NO: 393100 - RNA, 92 nt, Homo sapiens
aaaagguaaaaguaauugggaauaugucaccccaugggauuuaaguggccaacuagcucuuccuuggugacauuucuugucuugugccuuuu

SEQ ID NO: 393101 - RNA, 65 nt, Homo sapiens
aacucuauacuuuugggugucgcugcuauaaucuaguucuccuuauugcagauacccaggaaguu

SEQ ID NO: 393102 - RNA, 72 nt, Homo sapiens
uaccuuguaucuguuaggauugcaucuggcuucaagaaacagcccuacuucagcagccuaagcagaaaggua

SEQ ID NO: 393103 - RNA, 64 nt, Homo sapiens
uacauaguaagcaucuccugugugccaggcucugcacuagacccuggggaugcuguacuaagua

SEQ ID NO: 393104 - RNA, 57 nt, Homo sapiens
uauaugguuuuaagguuaaggacuuugguaggcagaauagucccuuaaaacuaugua

SEQ ID NO: 393105 - RNA, 90 nt, Homo sapiens
gcagauuaacaauuuguauuuagcaauggagguaguguauccuugagauuacaaagcagucauuaguuauauugacagauuuaaauuugc

SEQ ID NO: 393106 - RNA, 73 nt, Homo sapiens
cuuguuacauuuucacugacucaagggccauugccaacagccuagccaucuggucaggagaaugguaacugag

SEQ ID NO: 393107 - RNA, 70 nt, Homo sapiens
ggcugugugaugugucaucugagagaguggguaaccccuauucccagcacauggccauuuauuuagagcc

SEQ ID NO: 393108 - RNA, 78 nt, Homo sapiens
cagcauuaugcacuuuacucauuuaagguauguugugaugugaacaaaucagccuguagaagaguagaugaccugcug

SEQ ID NO: 393109 - RNA, 80 nt, Homo sapiens
ugcugauuacaaugugauaguugcuguucugggcagaaguuccugcugaguuacgguaauugcucaggguguuaacagca

SEQ ID NO: 393110 - RNA, 86 nt, Homo sapiens
gcuauuuucaaauaucccaauguaauaucacaaagguuuaaucaagucauaucugugugaugaaaaacauggguuugaaaaauggu

SEQ ID NO: 393111 - RNA, 56 nt, Homo sapiens
uugagacugaguuucacucuuguugcccaggcuggaguguaaugacucgaucucgg

SEQ ID NO: 393112 - RNA, 91 nt, Homo sapiens
gaguggagugucuauauuaggcaguggagaaauaaacaggccuccuucaggucgucguuuaguugucccuucuuaaagagguuuuccacuu

SEQ ID NO: 393113 - RNA, 72 nt, Homo sapiens
uaauaucauugaaucauuggggcaaagugauuuacuguuacugcuuaagugauucaacauuccugaucauua

SEQ ID NO: 393114 - RNA, 76 nt, Homo sapiens
gguccccuuagguaccuuaucaauuucucucgucucuucaguggggcuagagacaaguugcugagaaaucuaaacc

SEQ ID NO: 393115 - RNA, 60 nt, Homo sapiens
ccuaaagugcugagauuauagguguaagccacugcaccuggacuuuuuagacauuuuagg

SEQ ID NO: 393116 - RNA, 77 nt, Homo sapiens
gucagugguucuaaaccuuuuuuggucguggaaaauucagugggguccacaaccaaagaagguuaagaaccacugac

SEQ ID NO: 393117 - RNA, 73 nt, Homo sapiens
gccugccugugcuagugcagggaaaucuuuggaacucuuucaaauguucccuguacuggccggacaaccaggc

SEQ ID NO: 393118 - RNA, 75 nt, Homo sapiens
uuaagcaaaggggaauaagaaguggaagggaccgguuaacugacuggaaucucuggcuucuuacucccuacuuaa

SEQ ID NO: 393119 - RNA, 97 nt, Homo sapiens
gggauauuuggcacugucuguagacauuuuugguugucacaacugggugggaggcaaggugcuacagacagugaguguguaagaggccaggaauccu

SEQ ID NO: 393120 - RNA, 62 nt, Homo sapiens
gggugugcaaaucucugaguaucuuuucaaauaaaggaaggaaauuaguuauuugccuaucu

SEQ ID NO: 393121 - RNA, 69 nt, Homo sapiens
accaggcaucucauuccuucugggcugauuugguccugauggccacagcagggaguggggacagcuggu

SEQ ID NO: 393122 - RNA, 57 nt, Homo sapiens
uuugauguugagacuauaaagcuacaguaaucagcacagugugguauuggcaucaaa

SEQ ID NO: 393123 - RNA, 55 nt, Homo sapiens
cuaguucuagaucccugaggaaucuccacacugacuuccacagugguugaacuag

SEQ ID NO: 393124 - RNA, 121 nt, Homo sapiens
agcugaaaacucuagauccucauuucuucugguuucauugcaguuagaacagaagucugaaaccuagacucaacuguucagugccauuuggccagaacuugagacaggaucuaggaaagcu

SEQ ID NO: 393125 - RNA, 90 nt, Homo sapiens
gguccaguugcauuuucauguaauauauuucaggccacaagcuguugugaagccuauuucaguuauguggaaaguguuacuucugagauc

SEQ ID NO: 393126 - RNA, 78 nt, Homo sapiens
agcccucauuaucacacgccuugcuucauuuacuuuaucagaaagaaaaugguggugguggugguggugagaauggcu

SEQ ID NO: 393127 - RNA, 94 nt, Homo sapiens
gcuuccuggucauggcaguguaugauuauauuaugauaucccgaucaugguagauuucugaugauacuaguugccaaaacaugauggaggaagc

SEQ ID NO: 393128 - RNA, 72 nt, Homo sapiens
ugucaguauuugguagaguucgauaccuguaacucacugaaacagcaguuuccgacucaccaacaccugaca

SEQ ID NO: 393129 - RNA, 59 nt, Homo sapiens
aacccauugucauccuugcagugauugugagaaaaacauccugcaugagacaguugguu

SEQ ID NO: 393130 - RNA, 60 nt, Homo sapiens
guccuguccuuaaauuuauuuugugggauaaucguauaaaguaauuucuaggggcugggc

SEQ ID NO: 393131 - RNA, 61 nt, Homo sapiens
uacugguuuuggugggcagguggggagaaagaaagguuuaauaagcccaaaaaaaguagua

SEQ ID NO: 393132 - RNA, 85 nt, Homo sapiens
ucccaguucuguggauugacuggaccagcugggguaguucucauuuggggucucucaaguggucgcaguuagauagcagcuggga

SEQ ID NO: 393133 - RNA, 98 nt, Homo sapiens
aggcaggagaaucacuugaacccgggaggugaagguugcagugagcugagauagugccauugcacuccagcccgggugacaagagugagacucugucu

SEQ ID NO: 393134 - RNA, 130 nt, Homo sapiens
cucaaaauuucuuugacuacuugggcccuuuuguaguuccacacagauuuuaugauuuuuaaaauauuucuuugaggaaugucauuuguguuuugacagggauugcaucaaauguguagauucuuuuggg

SEQ ID NO: 393135 - RNA, 82 nt, Homo sapiens
ugcugggcuuaauaccuagguaauggguugucaggugcagcaaaccaccaugacacauguuuaccuauguaacaaaucugca

SEQ ID NO: 393136 - RNA, 80 nt, Homo sapiens
ucagauguccuagagagaugguggucuggauggaguccaucuaggaaagauucccugaccaucacccucaucugcacuga

SEQ ID NO: 393137 - RNA, 59 nt, Homo sapiens
acaggggugguaucuauuuuguuaguggacagacaucacuggaguggugcuucccuugu

SEQ ID NO: 393138 - RNA, 63 nt, Homo sapiens
cuugugccacuguuggccaucccuccuccuggggcugugaaacaugaccuauggugguauaag

SEQ ID NO: 393139 - RNA, 81 nt, Homo sapiens
ccuccgaugcugcuuugguagaaaucuuugguuuggagucagacacuuuggugccaagacagguuuuuauaaguuaggagg

SEQ ID NO: 393140 - RNA, 65 nt, Homo sapiens
acuuaacaguggucugugguaucugaggaaacuuuagaugaacagaaagccacuguuuuaugagu

SEQ ID NO: 393141 - RNA, 99 nt, Homo sapiens
gaggcaggagaauggcgugaacccgggaggcggagcuugcagugagccaagaucgcgccacugcacuccagccucggggacacagcgagacuccaccuc

SEQ ID NO: 393142 - RNA, 126 nt, Homo sapiens
aaagaaagagaaaaaagaaaugauugaugguguuuuucagaggaccccagucccauuaucugccuuggaaaugggacugggguccuuugaaaaacaccuuuuaucauuucuuacguuuuuuuuuuu

SEQ ID NO: 393143 - RNA, 101 nt, Homo sapiens
auguaguugagcaguuuugagugaguuucuuaauccugaguuguaguuugauugcacuguggucugagagacaguuuguuauaauuucuguucuuuuacau

SEQ ID NO: 393144 - RNA, 91 nt, Homo sapiens
cacuuuacacuguaucuuccuccaggcaauugaguuauuuggaaccagcuaggggucagugucugugauggagaggugcagucuugaggug

SEQ ID NO: 393145 - RNA, 60 nt, Homo sapiens
acaguugaggugaaguaauauucuaaguaccaugacuugaucauugcucacuuuaucugu

SEQ ID NO: 393146 - RNA, 86 nt, Homo sapiens
aacuccuggucaggugcaguggcucugaccuguaaucucagcauuuugggaggccgaggugagucgaucacuugaggucaggaguu

SEQ ID NO: 393147 - RNA, 77 nt, Homo sapiens
cauguuuauuuuaauauguauacagacagauacagaaacagauguagauguguguauaugugugguuaguaugcaug

SEQ ID NO: 393148 - RNA, 80 nt, Homo sapiens
gcugcuuucugauuacucacauucuguuucuugcuuuuaaaaaaacaguaaagacaagaguguuggaccaguauugcagu

SEQ ID NO: 393149 - RNA, 60 nt, Homo sapiens
uccucagcuccuaucucuguauggccuggcuuuuccuagguuaugauuauagagcgagga

SEQ ID NO: 393150 - RNA, 64 nt, Homo sapiens
ggagaccucaguucagucuuacacaggcuucuuaccucaggugagucacuuugcuggggucucu

SEQ ID NO: 393151 - RNA, 67 nt, Homo sapiens
ggcucagaauuggggaaugguggcuuuagugccauguauuugcuauccauacccuacuucacaagcc

SEQ ID NO: 393152 - RNA, 59 nt, Homo sapiens
gacauauccuguacuaagguuuucccaacuauuuggguagcccuuaaugcaggcaaguc

SEQ ID NO: 393153 - RNA, 57 nt, Homo sapiens
uugcaugggagcugggugaggccugugacugcuggcuucuccccacuuuccugacaa

SEQ ID NO: 393154 - RNA, 102 nt, Homo sapiens
cucacaaaaguaacagcuaggggaugauaggagaugcgugcaguuguugcaguccuguauggucccuguuccaugcuccuggcucuaguugaaggccgugag

SEQ ID NO: 393155 - RNA, 57 nt, Homo sapiens
gugccgggacagugguaccuuagaugggaaggccccaguaaugccacugccuggcau

SEQ ID NO: 393156 - RNA, 102 nt, Homo sapiens
cguauaauugucccuuccaccuucuaacucccauguucaagcacaauccccaguaugauggcauuuggaguugggacuuuggcagguaauuagauauauaug

SEQ ID NO: 393157 - RNA, 83 nt, Homo sapiens
gcugucucucauuagccauaggguguguugugguguccagugugacauuauuagguuaaccuauagcuacaugugaugauagu

SEQ ID NO: 393158 - RNA, 91 nt, Homo sapiens
gucugaaaacuuuuggcaugaaguguguuuuaucucugugacuucuaacccuagaugguagcauauauuuagcaaauaaaccauuucagac

SEQ ID NO: 393159 - RNA, 82 nt, Homo sapiens
uaguuuccauguuguugugcaguuuugagugaauuucuuaaucaugaauucugauuagauugcacuguggucugagagacug

SEQ ID NO: 393160 - RNA, 82 nt, Homo sapiens
uggaagaggauucuacagggugcuuauaaaaucuccaagcuuaggaaaaugcacauaaguaguuucuggauauucucuuuua

SEQ ID NO: 393161 - RNA, 59 nt, Homo sapiens
uacuacucugcagagaugcauaacaguaaaacacguguagcauguuugucagagaagug

SEQ ID NO: 393162 - RNA, 90 nt, Homo sapiens
cuuucucccuucacuuaggacuuuucuugagagugacuguaucagcuauggccacucucaacaaagagaucucaggaccagguuagaaag

SEQ ID NO: 393163 - RNA, 65 nt, Homo sapiens
cuuucucagugagacccgagaugcuauguaagucuaacaaccaccucacugcuguacuggggaag

SEQ ID NO: 393164 - RNA, 89 nt, Homo sapiens
cauggcucacaccuguaauccuggugcuuugggaggcucagacaggagguucacuggagcccaggaguuggaggcugcagugagccaug

SEQ ID NO: 393165 - RNA, 64 nt, Homo sapiens
acuugggucuggaaggucgaugcugcagugagccaugauugcgccauugcauuccagccugggu

SEQ ID NO: 393166 - RNA, 107 nt, Homo sapiens
guccacaccucuugagagcucaucuuuuccuccaccauggugaccaagagcaccacccaugcccugccaucaaaguggagggaaggaccaaucucgggccccuggau

SEQ ID NO: 393167 - RNA, 73 nt, Homo sapiens
gggagggcauuuucuggguuaucagggguuaaaggguugccagucuugacagcugaggcccagaguacccccc

SEQ ID NO: 393168 - RNA, 82 nt, Homo sapiens
ugaacuuuauguaaauggacuuacacaguauguuuucuuuuauguguggcuucuuugguucaguauuauuuugugaaguuca

SEQ ID NO: 393169 - RNA, 80 nt, Homo sapiens
gguaucuuuauagcaaugccccaauccuugguaagaauuuucuguauuaggcuguucaggcacugcuauaaagaaauacc

SEQ ID NO: 393170 - RNA, 81 nt, Homo sapiens
guaguucaagucuuaguucuuagaggaaucaacauuuacuuuuguuauuauucccuguagaauaaggauggacuggacuau

SEQ ID NO: 393171 - RNA, 67 nt, Homo sapiens
uuccuaucuggccuagaacaauuaauuagcuguaagucuuguugacuaagucccuuggccauaggga

SEQ ID NO: 393172 - RNA, 75 nt, Homo sapiens
aguuugaagcuaaggugcuugguuacacaggccccaaaauacuauuaggccaaccaguccaaccuugcuuaaacu

SEQ ID NO: 393173 - RNA, 84 nt, Homo sapiens
ugaguuuggaaaauuaucaucugaagauugcuguucaacuuuuggagagugauauucagaugcuuugaagacuuccaauauuca

SEQ ID NO: 393174 - RNA, 74 nt, Homo sapiens
cuauugucagugaguaaagguucauugaauuuuucuucugaugaauaaaauggucaguuuucucagugcaaugg

SEQ ID NO: 393175 - RNA, 70 nt, Homo sapiens
cuguugcccaggcuggagugcaguggugcaaucuugguucgcugcgaccuccaccucccggguucaacag

SEQ ID NO: 393176 - RNA, 81 nt, Homo sapiens
uuuucuaguucuuuaacaugcaucauuaggugguuuauuugaagaauagaaccuaaugaugcaugagacagaacuagaaaa

SEQ ID NO: 393177 - RNA, 74 nt, Homo sapiens
gccuuguaguauaguuugaagucagguagugugaugccuccagcuuuguucuuuuggcuuagaauugucuuggc

SEQ ID NO: 393178 - RNA, 59 nt, Homo sapiens
uguuauuauuuauauaauuaaguucagcacucgauguguuggcuaaaugaaugauagca

SEQ ID NO: 393179 - RNA, 56 nt, Homo sapiens
ugagcaagaaauagaaacagauuuaaggaaaucuagguguuggcuguucuagcuca

SEQ ID NO: 393180 - RNA, 81 nt, Homo sapiens
caggagaucagaguuagaauuguacugcaaucaggggaauauuuugccuugacuacgguucaguuaaaaguucauuuccug

SEQ ID NO: 393181 - RNA, 107 nt, Homo sapiens
gcagaugucuacaacuccaaggacacaugcauuggucuauuaugugaaaaaguaauccauuucuauuacauuaagccaauggauucuugaguuugauuuauuacugc

SEQ ID NO: 393182 - RNA, 59 nt, Homo sapiens
gugaaguguuuuuucaggcaugucuacuauugcaguuugcauggccucugacacaucac

SEQ ID NO: 393183 - RNA, 71 nt, Homo sapiens
gcccuuguuuuuccauauggauauuacuccacaaagaguaauuacucucugaguaauauccuaugaugggc

SEQ ID NO: 393184 - RNA, 96 nt, Homo sapiens
uagauagaguggcauggauucaauuuuguaugcauaaauuaaauuuguaauguuuaagcaguggauuagaauuuuaacaugcuuucacuucauuug

SEQ ID NO: 393185 - RNA, 55 nt, Homo sapiens
ugcugguauuauguuauccagaagucucuauuuucuucugucauggcaaccagca

SEQ ID NO: 393186 - RNA, 111 nt, Homo sapiens
gagccugccugaucaucuucacugucaccuugcucauccucggaggaugaggacuuuucaucugaggaacuggcaaagauggcccugaauaaguccauggaugggcggcuc

SEQ ID NO: 393187 - RNA, 94 nt, Homo sapiens
cucaaguuaucgacacaaugaguuuaauaugucuguuagacaucugaauggagacguugaauaggcaguuaaguuuaugaguguggagcuuggg

SEQ ID NO: 393188 - RNA, 85 nt, Homo sapiens
uggaucauauuauugaaaguugucaacaugaaacuguguuuuugaaaucaaaagugguuaaauauuggcaaucacaugugguuca

SEQ ID NO: 393189 - RNA, 60 nt, Homo sapiens
acaaaaauucaugucugccagaaucucagaaugugacuuauuuggcaauaggguuuuugu

SEQ ID NO: 393190 - RNA, 71 nt, Homo sapiens
aggaugcagucaggaagcuaaccaaaacccaccaaaaccaagagggugaggaaagcaucacugaucauccu

SEQ ID NO: 393191 - RNA, 66 nt, Homo sapiens
ugcugaaggcaagguggauaaugaagcuguaguaggcuugcacaaacacuugucuggaauuuagua

SEQ ID NO: 393192 - RNA, 125 nt, Homo sapiens
ccucggccucccaaagugcugggauugcaggcaugagccaccgugcccggccccugauuaaaaaauuucaagcagaccagcacaggggcucacgccuguaaucccagcacuuuggaaaaccaagg

SEQ ID NO: 393193 - RNA, 88 nt, Homo sapiens
ggagaauugcuugaacccgggagguggaaguugcagugagcagcgaucacgcuacuguacuccagccugggugacagagcaagacuuc

SEQ ID NO: 393194 - RNA, 79 nt, Homo sapiens
ggaacaguugcacagucuuuccuggacuuacaacguugauacuuuggaagaguccaggcaaguuguuguguagaaugcc

SEQ ID NO: 393195 - RNA, 86 nt, Homo sapiens
ucagauagcagcuccaagaauucugucauguuuauauuugcauucagugagagaagcaggauagaguuuuacucaagcuugccuga

SEQ ID NO: 393196 - RNA, 55 nt, Homo sapiens
uucugugcugaaucaaagacugcuauuugugcucauuugcgguuuaguaacagaa

SEQ ID NO: 393197 - RNA, 75 nt, Homo sapiens
cuguaauaucucaguguuugcaaauuccugcaguuagugucucuguauuaucucaguguuuguaaacaauuacag

SEQ ID NO: 393198 - RNA, 55 nt, Homo sapiens
uugagauggagucucacucuuuugcccaggcuagagugcaguggcuugaucucag

SEQ ID NO: 393199 - RNA, 57 nt, Homo sapiens
gcauauugguauaggucuauuucugaguuuucuuuucugaucuguugaucaaugugu

SEQ ID NO: 393200 - RNA, 57 nt, Homo sapiens
uugcaugggagcugggugaggccugugacugccggcuuucccccacuucccugacaa

SEQ ID NO: 393201 - RNA, 62 nt, Homo sapiens
accuccucugggccugguguuuguggcaucuguggcaguuugaauaacagccccagggaggu

SEQ ID NO: 393202 - RNA, 95 nt, Homo sapiens
ugaccuuccuucuggucugacugaguaagcagaagcaauucauagacuuccuuccaauugcuucugcuuacucacucagaccagaaggaagguca

SEQ ID NO: 393203 - RNA, 57 nt, Homo sapiens
ugugcuauuuuugcauauguguguguauauccacgcacauguacacauguaugcaca

SEQ ID NO: 393204 - RNA, 94 nt, Homo sapiens
aggaagagagagagacagagacagagaaauaaagcaagugguaagauauuaauuguccauuauucuguucuuagguguuccugauucucuucuu

SEQ ID NO: 393205 - RNA, 56 nt, Homo sapiens
cugucuggaguccuucgugugcuuguugauucacucugcaugaccacccuaggcag

SEQ ID NO: 393206 - RNA, 69 nt, Homo sapiens
aauggcauugguccuuuuggauaaagucucuccuuaccugagucuggauuccugauugacagugccauu

SEQ ID NO: 393207 - RNA, 77 nt, Homo sapiens
gguuuuuuguccuugagauaguuugcugagaaugaugguuuccagcuucauccaugucucuacaaaggacaugaacu

SEQ ID NO: 393208 - RNA, 62 nt, Homo sapiens
uuaguaguaaugaauucauggauaaucauuuuauucuauggguuauaauucauuaguauuag

SEQ ID NO: 393209 - RNA, 78 nt, Homo sapiens
augaggaagagagaaaagugugugcagagggcaggaagaaagcccaagcucugugcauuacacuuuucucagucucau

SEQ ID NO: 393210 - RNA, 81 nt, Homo sapiens
cuuugugauaguuacuaaacauuucuuaggaagucucaguuuucugagaugcaaaaugagaauuguugcagagccauaaag

SEQ ID NO: 393211 - RNA, 82 nt, Homo sapiens
cagucauucuuucuguggaggggcugacagaggccagaaagaauacccuagugagcucucuccacauguaaagaaaccacug

SEQ ID NO: 393212 - RNA, 79 nt, Homo sapiens
uggguuuaaucauauggaucccagcuuacagaagucauguauuaccaccuagugagcuccucucuaugugucagaucua

SEQ ID NO: 393213 - RNA, 62 nt, Homo sapiens
uaacaacucuuugguucugugcagccuauggacagcuuaugggcaggaauuaggggguguua

SEQ ID NO: 393214 - RNA, 64 nt, Homo sapiens
gccagaagucaaggcauuuccagcagcccccaugcccuacuggaggugucuuggguucccuggc

SEQ ID NO: 393215 - RNA, 108 nt, Homo sapiens
gcugagauuacaggcgugagccacagugccugcugucuaauauauucuuuaugcauuuaaaaauaugucaagaggcuggacacggaggcucaggucuguaaucccagc

SEQ ID NO: 393216 - RNA, 75 nt, Homo sapiens
uaaauauccuugagauuuucagcuugacugggagaagaauuuuuuccaccagcugaaaaucaguaagcccauuua

SEQ ID NO: 393217 - RNA, 75 nt, Homo sapiens
cauuauuacauucagcuguuguuucaaugugucugaaaggguaaaugacuauuuagauggccuggguguguggug

SEQ ID NO: 393218 - RNA, 55 nt, Homo sapiens
uugagauggagucucgcugugucacccaggcuggagugcaguggcaccaucucag

SEQ ID NO: 393219 - RNA, 102 nt, Homo sapiens
gagacaggaggaucgcuugagccuacggaggucaaggcuacagugagucgugacugcaucauuguacucuagccucugggcaacagaaugagauccugucuc

SEQ ID NO: 393220 - RNA, 84 nt, Homo sapiens
ugggaguacaggggaagaauauuaggggauuucggagugguaaccagacuaagugaaaaacuaauguuuuucucuguacucuca

SEQ ID NO: 393221 - RNA, 60 nt, Homo sapiens
gagaaugaugguuuccagcuucaucuaugucccuacaaaggacaugaacucaucauuuuu

SEQ ID NO: 393222 - RNA, 63 nt, Homo sapiens
guggaauacuaccuaagauguuccuacucuagagaugagaaccuccagcaagguaguacccau

SEQ ID NO: 393223 - RNA, 76 nt, Homo sapiens
gccugggacugacugggaggcucugaccauuuacccaccacagguagguuguguucugagccucagguucacaggu

SEQ ID NO: 393224 - RNA, 98 nt, Homo sapiens
acaugagacuaggguuguuuggccuguaggguauugguaggggcugcuguggucccuuugcucacccuugggccagcugacuccuucauucucuaugu

SEQ ID NO: 393225 - RNA, 70 nt, Homo sapiens
cuuuacagcagcaucccaugcugcaugguacaaauuuacuguauuaguccauuuucaugcugcuauaaag

SEQ ID NO: 393226 - RNA, 87 nt, Homo sapiens
gauugguuuccugaauagagcacacugaugggucuugacucuuuauccaauuugccagucugugucuuuuauuuggaggauuuaguc

SEQ ID NO: 393227 - RNA, 76 nt, Homo sapiens
ucacuugaacccgugaggcggagguuacagugagcaaagauuuugucacugcacuccagucugggugacagaguga

SEQ ID NO: 393228 - RNA, 76 nt, Homo sapiens
gaguuguuuucuacaguguauuuauggagggugcaagugccuuuugacaguucuauuguguauuguaaaaaaacuu

SEQ ID NO: 393229 - RNA, 94 nt, Homo sapiens
uugcuuuuaagaaaaugcuuucuuggaccauuuggauuacagccuuuccacuaggcugcaaauauucauaaagguauucauuccuaaaagacaa

SEQ ID NO: 393230 - RNA, 60 nt, Homo sapiens
cugaaggggagguuagaguacgaagagcauucacgcuacugucuagaccucauccuacag

SEQ ID NO: 393231 - RNA, 57 nt, Homo sapiens
uuaaagugcuguuuuugccgggggcaguggcucaggccuguaaucccagcacuuuag

SEQ ID NO: 393232 - RNA, 94 nt, Homo sapiens
ccuuuuuggauucacuucugauuguucugaguauaucaaguugauucuuaguuuagugcugauaugcuuugaacucucuggaagucucaagagg

SEQ ID NO: 393233 - RNA, 64 nt, Homo sapiens
gaggucacugccuugguuucaagaggccaagcuaucucuuccuggaguguuggggcaggaucuc

SEQ ID NO: 393234 - RNA, 73 nt, Homo sapiens
ccaaagugcugguauuacaggcaugagccauggcgcccggccaaggccacaccucuuaaugccauuaccuugg

SEQ ID NO: 393235 - RNA, 65 nt, Homo sapiens
gugaguuguuuucacaaacccaugauggauaauggcuaauggguaguacugugguaacaaagcac

SEQ ID NO: 393236 - RNA, 69 nt, Homo sapiens
ggagcuugcuacuaugccuggcuaauuuuuuaaguuuuuaguauguugccuaggcuggucuugaacucc

SEQ ID NO: 393237 - RNA, 98 nt, Homo sapiens
uuauuuuacuucagugaaucagagugaugguuuaaguauugcacaagggcacuucaugugaugcaugccacacuuuggauucugcaugggagagauaa

SEQ ID NO: 393238 - RNA, 75 nt, Homo sapiens
agauguuugaucgguguccauuagucuuuucuugaaaauauuacucaaagagaucuaugggcacuauguauaucu

SEQ ID NO: 393239 - RNA, 114 nt, Homo sapiens
guggauccaggcugggauucccucuaccuucacaguggugggagacgucaggaugacagucuggggucuuuccacugugggcacaaagaggcuauguuccaguccuugauccac

SEQ ID NO: 393240 - RNA, 60 nt, Homo sapiens
uucucacggcccugcgcacuggcauuuuccaccuguaaugcguggcaggagccgugggga

SEQ ID NO: 393241 - RNA, 74 nt, Homo sapiens
agggaacacuuuuacacuguuagugggaauguaaacuaguacaacuacuaugaaaaacaguguagagcuuccuu

SEQ ID NO: 393242 - RNA, 121 nt, Homo sapiens
ggguugccugagacuuucucgguauuauuauguuggugcaaagguaauugagguuuucgccauuacuuuuaauaccuuugcaccaaccuaauagcaaugaaagucccacaucucaggaccc

SEQ ID NO: 393243 - RNA, 130 nt, Homo sapiens
auguuagcaacuagcucaauggauucccagauguuagcaucuggcacuauggacucucaaauguuagcuucuggcaccauggaugcucagauguuagcgucugguaccauggaugcccagauguuagcgu

SEQ ID NO: 393244 - RNA, 68 nt, Homo sapiens
ucucugcagaaaauggaguucuaaguauaguaacaauuuaguuacauaguuacuuccauuuccagaga

SEQ ID NO: 393245 - RNA, 84 nt, Homo sapiens
cagacaucugacugagguauaucccauuagaaguuccuuuaguaaaggucuauugaugaaguguucucauucuuucuuugucug

SEQ ID NO: 393246 - RNA, 69 nt, Homo sapiens
cuugaacccaggagacggagguugcggugagccgagauugcaccguugcacuccagccugggcaacaag

SEQ ID NO: 393247 - RNA, 75 nt, Homo sapiens
uugggcaguaggagcagguucuuuucucucggaucuaccaagcagaauugacucuguuuuuucucuuuucuccaa

SEQ ID NO: 393248 - RNA, 59 nt, Homo sapiens
ugagacggaguuucacucuugucacccaggcuggagugcaagggugugaucuccgcuca

SEQ ID NO: 393249 - RNA, 69 nt, Homo sapiens
uuggaauauuauuauugggcaguaaaauuauuaguuacuauuuaugauugucuaguuaguaguaucuaa

SEQ ID NO: 393250 - RNA, 73 nt, Homo sapiens
gaggccagacuagagagccaaccgucagggagccgagcagccucuggcuuggcuggcaucucugcccagucuc

SEQ ID NO: 393251 - RNA, 60 nt, Homo sapiens
ucacacuuaucccacucagucauggcaaagagaagacacuacuggcacugguaggugugg

SEQ ID NO: 393252 - RNA, 57 nt, Homo sapiens
agagcuaguauuuacggagcauggacucugggccaugcagccauagcauuuaguucu

SEQ ID NO: 393253 - RNA, 69 nt, Homo sapiens
gcagaacucacuggguguaaaacauguagcaugguuucuugcucauaguaggugcucagugaaaauugc

SEQ ID NO: 393254 - RNA, 57 nt, Homo sapiens
cauaaagauggaggaggccaggcaggguggauuaugccuguaauccagcacuuugug

SEQ ID NO: 393255 - RNA, 64 nt, Homo sapiens
acugugaauagugcugcaauaaacauacgugugcaugugucuuuauagcaguaugauuuguagu

SEQ ID NO: 393256 - RNA, 65 nt, Homo sapiens
gaaagaaagccuaaugcaagacagaguauaaccaagucugcuuugucugagacuguuuuacuuuc

SEQ ID NO: 393257 - RNA, 64 nt, Homo sapiens
uagugagcuauguccugguuuggggccguccguuguuaggugcuccauuagggcuggcuuauug

SEQ ID NO: 393258 - RNA, 64 nt, Homo sapiens
cuugcucaacaucagagaguucacacgggagagaaacccuaugaauguaucgaaugugggaaag

SEQ ID NO: 393259 - RNA, 103 nt, Homo sapiens
cugaggcaggagaaucacuugaagccaggagauggagguugcagugagcagagaucgcgccauugcacucuaucccggugggcagugcgagacuccaucucag

SEQ ID NO: 393260 - RNA, 72 nt, Homo sapiens
guguucugaauguuuucuucuauucugauguuacacucucuaaaauuaucagaaaccugcauuucagagcac

SEQ ID NO: 393261 - RNA, 77 nt, Homo sapiens
ggagaacuuuugugucuagcucagggauuguaaacacaccaaucagcacccugucaaaauggaccaaucagcucucu

SEQ ID NO: 393262 - RNA, 75 nt, Homo sapiens
augcugcguaucaacaggguggccaguguauuuuuacauguaaguacacaaaggcacucuguuguuaccacgcau

SEQ ID NO: 393263 - RNA, 58 nt, Homo sapiens
ugagcugagauuaagcugcugcaugauuucagcccccuucaaauuuaaucucugcuca

SEQ ID NO: 393264 - RNA, 87 nt, Homo sapiens
guguauucugauacugaaagcuguugguuuucagcugaggguaauauuuaauugggaagccauagcuuuuaucuuauuguuauacac

SEQ ID NO: 393265 - RNA, 58 nt, Homo sapiens
ggcccacaagccaaauccagaauuaugcaacagagacugcauguggcuuuugaaggcu

SEQ ID NO: 393266 - RNA, 114 nt, Homo sapiens
gguucaucaagaggcugagggauccaguuguggcuccgauguuugggugcccuugggauacccgggaggcaggagucauagauuuggagcgucccgaguggccagacgagagcc

SEQ ID NO: 393267 - RNA, 87 nt, Homo sapiens
caguaucacuccauuuaguccuuuuagaagaaauaguacuucauaggcuuuacugacuuuuuaggggacugaaugugguaguaauug

SEQ ID NO: 393268 - RNA, 75 nt, Homo sapiens
gagcagcuggugaaggcugaaaagugggucaggucccaggaggugcagguccguuuuuagcuuucauuagggcuu

SEQ ID NO: 393269 - RNA, 99 nt, Homo sapiens
ugagacagggucucacuuugucacccaggcuagagugcaguggugcaaacacagcuuacugcacuugaccuccugggcccaagugauccuccugccuca

SEQ ID NO: 393270 - RNA, 76 nt, Homo sapiens
uuuugcuucuuuuggcuuuuccuugaaucugccugugugcccuuagguuucaucugaaaagcgaaaugaugagaaa

SEQ ID NO: 393271 - RNA, 56 nt, Homo sapiens
cuuauaccaucaccauauuuagacuaggaaauaaaaugagauuggugugguauaag

SEQ ID NO: 393272 - RNA, 82 nt, Homo sapiens
uucuucagaaggcuuuuggaaauaagaaagucucauuaauaacaauuuaggcugguauuuacaaaagcucucuuguuaggaa

SEQ ID NO: 393273 - RNA, 57 nt, Homo sapiens
gcucuuuugggguaauucugagcaaguuugccaaguucacaaccaucccaggggagc

SEQ ID NO: 393274 - RNA, 55 nt, Homo sapiens
uugagauggagucucacucugucgcccaggcuggagugcaguggcgccgucucag

SEQ ID NO: 393275 - RNA, 76 nt, Homo sapiens
aaaagucucuaaguuguuggaguuccauuguucuaaaauaauuaggaacuguggaccuaauaauuuaaaagcuuuu

SEQ ID NO: 393276 - RNA, 75 nt, Homo sapiens
aggggcguccugagugaggcugggcagucccuugggccacguccucccagagcccgcccagcuucaccagccccu

SEQ ID NO: 393277 - RNA, 91 nt, Homo sapiens
cugguucugacccuugauuccagaacucucugacaggucucauagcaauucugucaggaguuuuagaaucuuauuaucacucuagaaucag

SEQ ID NO: 393278 - RNA, 56 nt, Homo sapiens
ugcugugucuuucugugaaaagagaaacauuaucucuuuuuacucguucauaugca

SEQ ID NO: 393279 - RNA, 56 nt, Homo sapiens
cagacuaggaagaagugaugccuccuuggagaaguccugcauucauccugguguug

SEQ ID NO: 393280 - RNA, 89 nt, Homo sapiens
guguuuucccuuggauuuagcaauagccugcaucugcagcuuguuugaaggacuguuuggaggacuaugcucaggccauuggagcacac

SEQ ID NO: 393281 - RNA, 99 nt, Homo sapiens
gcugccagcauggcugccagaacaucauugggggcuacaggugcagcugcccccagggcuaccuccagcacuaccaguggaaccaguguguuggcaagu

SEQ ID NO: 393282 - RNA, 88 nt, Homo sapiens
uuuuauauagggcauucaauuaauauuauacucucagauagugucuugagagauaauugugguuggguaauccuugccuuaaguaaaa

SEQ ID NO: 393283 - RNA, 77 nt, Homo sapiens
cauuuauugcugcaaaauuguucuuugcuccagcauuuagccauaguugugagcauauuaguauugcacucuaaaug

SEQ ID NO: 393284 - RNA, 73 nt, Homo sapiens
cgccugagagaugagaccucucacugagguguguuguccucucacugaggugugugguccucucacuuaggug

SEQ ID NO: 393285 - RNA, 66 nt, Homo sapiens
guauccugagggaggggagggaucaucagaguuggaagagugaugccuuuuuguccucaguuauau

SEQ ID NO: 393286 - RNA, 70 nt, Homo sapiens
gcuuguuggaaguaaacauuuuguacaauaauguuaggagguaacauuuguugaacaguguuucucaggc

SEQ ID NO: 393287 - RNA, 73 nt, Homo sapiens
ggagugcaguggcaagaugacuacucacugccaccuccaacuucuaggcucgagagauccucuugccaccucc

SEQ ID NO: 393288 - RNA, 76 nt, Homo sapiens
uauacuuuaaguuuuaugguacaugugcacaaugugcagguuaguuacauauguauacaugugccaugcuggugug

SEQ ID NO: 393289 - RNA, 85 nt, Homo sapiens
gguguccagguuggagugcaauggcaugaucuuggcucaccgcagccucugccucccagguucaagcuauucuccugccucagcc

SEQ ID NO: 393290 - RNA, 56 nt, Homo sapiens
uuugcacauugauuuuguaucuugagacuuugcugaaguugcuuaucagugucaga

SEQ ID NO: 393291 - RNA, 73 nt, Homo sapiens
caacagucaccgagugugccaucuucucacagaccucuaguagcaggauuucacauuuuggaaaacacuguug

SEQ ID NO: 393292 - RNA, 104 nt, Homo sapiens
ucuucuuuuucauuaagauuauuuuuaaccuacuaucaugacuguuaaguagauagcucauaaaaaggguucagaucauuaagguagguuuaaaagaaagagga

SEQ ID NO: 393293 - RNA, 78 nt, Homo sapiens
agccuuuauaagugagcuaagugccaauauuaauucaccaaagugagaugagcaugugcuuaguaaacgaugggggcu

SEQ ID NO: 393294 - RNA, 84 nt, Homo sapiens
uuaacuuuagggcguaauuaugguuguuaucuugguucgauaccauuggaauuaguggcaaucauauuguugcuuuauuguuaa

SEQ ID NO: 393295 - RNA, 81 nt, Homo sapiens
ggauaucacuaguuugguuuacucuggggauaucugaaaaaucucuggaagacuuagaguagcaucaguuguaggucaucu

SEQ ID NO: 393296 - RNA, 61 nt, Homo sapiens
ugcaccaaaaagccugcuuccauuuccaacaucuuaucuuugugaagcagguuuuucugca

SEQ ID NO: 393297 - RNA, 61 nt, Homo sapiens
gggcacuggcggggcagcucuggcuucucaggagcugaggagaucagccucccugcaaccc

SEQ ID NO: 393298 - RNA, 108 nt, Homo sapiens
agcucagccucaguagaacagagcaccaaguagauucauaaaguuuccaacucugggcccuggcuccuggauggcauuucuggaucugcccugggcuggggcagagcu

SEQ ID NO: 393299 - RNA, 69 nt, Homo sapiens
ggacaagaucuuccaccauucagaaucccacauuauaaucacaauauugcauccugggagauccugucc

SEQ ID NO: 393300 - RNA, 69 nt, Homo sapiens
gggagacucuggguuaaagaauuuuacaauccuuuguuaauugugagauucucugauuguaggucuucu

SEQ ID NO: 393301 - RNA, 70 nt, Homo sapiens
ucauuagauccauuaccuauaauaaccaucagauacuugguugauacauugaagguaauugguuuuauga

SEQ ID NO: 393302 - RNA, 55 nt, Homo sapiens
ggcacugugccagauccucuuggaguugcaaagcuuaagacaugguccacaugcc

SEQ ID NO: 393303 - RNA, 75 nt, Homo sapiens
uucucucucaguauuucugggguugucuguuuugaaucaauggucaugucaucccucagaagugcagggagagaa

SEQ ID NO: 393304 - RNA, 64 nt, Homo sapiens
gcuuauauuaucaucauuggcaggugagaaauucuucucuuucuacagugugauuguguaaagu

SEQ ID NO: 393305 - RNA, 58 nt, Homo sapiens
auccguggcacacugugauguguuauuacucaaauuaugaacagugcuggcaugagau

SEQ ID NO: 393306 - RNA, 69 nt, Homo sapiens
guugcuugcaauugaaaaauuuuuaaacaauacuagcaguacaguggaauugcaucaaaugcagguagc

SEQ ID NO: 393307 - RNA, 55 nt, Homo sapiens
caggagucugauaguauagauuguaaguaugcagucuguguuuacaggcucucug

SEQ ID NO: 393308 - RNA, 76 nt, Homo sapiens
aauauuaugaaccauccaguccuaugagucaugccuuuuuuugaagcauugcacuuggcauagacugcauaguauu

SEQ ID NO: 393309 - RNA, 66 nt, Homo sapiens
guucaguuugugaucauugucaaauaguguuuauuaagcauuuaccuauguguuacaaugcuggau

SEQ ID NO: 393310 - RNA, 114 nt, Homo sapiens
auagaucuuguuggacugagugggauauauugauaucaucugcagucucuuguuauuauaguauagugacuacaugugaugucaguauaucucacucaacccaacuagaucuau

SEQ ID NO: 393311 - RNA, 74 nt, Homo sapiens
ugccugaaucauugcauuaucaagggcaucucuuucuaucaagccauuugcucaaagcagugaaaucuucagca

SEQ ID NO: 393312 - RNA, 76 nt, Homo sapiens
uucucaaacaggggugacuuugucccccaggagacauuugggaaugucuggagacuugggucaucaaaacugagaa

SEQ ID NO: 393313 - RNA, 95 nt, Homo sapiens
ugaauguuuuuguaugucucugggugcagggggacuugaguuagcauuuacgccuagcaguagaauuccugcaucacaggauauauguauguuca

SEQ ID NO: 393314 - RNA, 59 nt, Homo sapiens
agcuccauauacuuaggauaguuuauguuaaauucuauacaucuggaguuccuggggcu

SEQ ID NO: 393315 - RNA, 63 nt, Homo sapiens
ggcugugguguugucauaaauagcucuuacuauuuuugagauauguuucuucaauaccuaguu

SEQ ID NO: 393316 - RNA, 89 nt, Homo sapiens
uuuggggcuaaaaacuuccuuguuuuguuauuguaucauauuggagcucacauauuuugaugagaggugauaaagcaaggguccccaga

SEQ ID NO: 393317 - RNA, 79 nt, Homo sapiens
agguuggagugcaauggugaguucucagcuuauugcaaccuuccccucccagguucaagcaauucuccugccucagccu

SEQ ID NO: 393318 - RNA, 61 nt, Homo sapiens
acuuauucguuuuggcugaggaccacagcaacacuguggaauguuuaucaaaacaguaagu

SEQ ID NO: 393319 - RNA, 64 nt, Homo sapiens
cuggcaaacagauggaccuggguuucugggacaguuccaauuucaaauguucucugguugucag

SEQ ID NO: 393320 - RNA, 101 nt, Homo sapiens
aguuuuaaaaucauguauuucacaguaaauccagaagaaauuaugcacuuaauuuuucugggugaauuguguuauagagguaauagaggauuauuaaaauu

SEQ ID NO: 393321 - RNA, 59 nt, Homo sapiens
gagauggugugcuguuggaaguggcuucaauccaaggcuuccaacaacgacaccgucuc

SEQ ID NO: 393322 - RNA, 65 nt, Homo sapiens
aguggcugagauuuauugagcaacuacuauaugcuaaggguuguaugcuuauugucucauccacu

SEQ ID NO: 393323 - RNA, 58 nt, Homo sapiens
caggugcaaguaauuccagcuacugaggaggcucaggcaguagaauugcuugaaccug

SEQ ID NO: 393324 - RNA, 70 nt, Homo sapiens
uggcaagggagaggggagacaauugagggcacagcaggugguuuuagcgccuuucuuccucuccuuucca

SEQ ID NO: 393325 - RNA, 63 nt, Homo sapiens
cuaugugucuauguguucucaucauuuaguucccucugauaagugagaacaugugguauuugg

SEQ ID NO: 393326 - RNA, 78 nt, Homo sapiens
gggaauccuuuuagggugugguaggauugguuacucaauaaauugaaaaauaaagcuaucauaucaucuggugauccc

SEQ ID NO: 393327 - RNA, 63 nt, Homo sapiens
auguugaaccagccuuguauuccuggaaugaauccuaccuggaaugaaaccugguuaugauau

SEQ ID NO: 393328 - RNA, 57 nt, Homo sapiens
caugguguauaugugccacauuuucuuaauccagucuauggcacauguauacuuaug

SEQ ID NO: 393329 - RNA, 79 nt, Homo sapiens
ggauuggauuauuuggucaauaaguauuuauuuggcauuuacuuugugccaaauacuuucauguugucuuguuuaaucc

SEQ ID NO: 393330 - RNA, 65 nt, Homo sapiens
cugugcuugagagaugacacagguaccucacugaguguuacuguagugguucuccagguggacag

SEQ ID NO: 393331 - RNA, 58 nt, Homo sapiens
gguuuugagcagagaagugcccugcgcugcagcagcugacagccaggcucugcaaacc

SEQ ID NO: 393332 - RNA, 74 nt, Homo sapiens
uuguuuauguuguugcuuuauaguaucacugguaugugugacagugguauguauacuagcgacacuauaaacaa

SEQ ID NO: 393333 - RNA, 69 nt, Homo sapiens
ucuuuauagcagugcccaacuccuggcaccaauuuacuguguuaguuuguucacacacugcuauaaaga

SEQ ID NO: 393334 - RNA, 83 nt, Homo sapiens
aaggaagauuuguuugaaguaaugaaacugaggacccacgggugacagacuucucaauuugauuacauucauaaauuuuccuu

SEQ ID NO: 393335 - RNA, 55 nt, Homo sapiens
ucuuuggucuacuuucauauguuauguuuucugaacaugagaguagaaauaagga

SEQ ID NO: 393336 - RNA, 59 nt, Homo sapiens
cauaagugaagucauuguauauugcagaccaacucuaguaggacaggauuucaguuaug

SEQ ID NO: 393337 - RNA, 99 nt, Homo sapiens
ccagugugcguguugcuaauuguauggcaggaggcacacggcaugcucugugugcucaucacaugcaauaggacaacauauugagccacagugcauugg

SEQ ID NO: 393338 - RNA, 78 nt, Homo sapiens
cccaguacugccggggacccaacucaagcuaucucaaaccaagugcugagcucagcuaguugaggugucugggggggg

SEQ ID NO: 393339 - RNA, 63 nt, Homo sapiens
uugugugacugcucuauuagggcggguuggcacuuugcuugccuuacuaugguguuaggccaa

SEQ ID NO: 393340 - RNA, 68 nt, Homo sapiens
gacaaugguacuagauaucuucagaguucacacuacacuuuuaccuugaaaaauauagucccauuguc

SEQ ID NO: 393341 - RNA, 72 nt, Homo sapiens
aucagauuccagaggcagcacccagaaucacuauauucuauugccuuuucugggugucugucugaauuugau

SEQ ID NO: 393342 - RNA, 56 nt, Homo sapiens
ucacacuguuuugauuauuauaacucuguauuaaguuuugaaaucaggaaguguga

SEQ ID NO: 393343 - RNA, 72 nt, Homo sapiens
guaaaaucuauaagugacuuugagauuccucaggaaagaccuucugaaaauaugaagucacuuauuguuuac

SEQ ID NO: 393344 - RNA, 69 nt, Homo sapiens
aguaauggcaccugacuccgagaugcagaagcaggaaauauuucugacaugcggcucaaguccaauauu

SEQ ID NO: 393345 - RNA, 82 nt, Homo sapiens
cuuggaucucagugcuuguuauuguucuauucggguuuuuaauuucuucagaguuuaauuauagcagguucuuuugucuagg

SEQ ID NO: 393346 - RNA, 72 nt, Homo sapiens
gaaagauggaagguuguuucuggaagcuguuagguuuuguuaaggcagagauaauacauuuucuuuucuuuu

SEQ ID NO: 393347 - RNA, 75 nt, Homo sapiens
uaucacuucuuuugugauuuuucaguuacuucaggccaucuggauguauacaugcaggucacaggggaugugaug

SEQ ID NO: 393348 - RNA, 56 nt, Homo sapiens
auugguucuguuuauaugauggauuacauuuauugauuugcauauguugaaccagu

SEQ ID NO: 393349 - RNA, 107 nt, Homo sapiens
guagagggauuagaggaauaauucuuuuugucuguuuggugucaugagggggacaggaaguuguucggugucaugagggggacaggaaguuguucagucccauuugc

SEQ ID NO: 393350 - RNA, 58 nt, Homo sapiens
auacccucugggugguuaguugcaaccuuuucuuggacagcacuaaaucugaggguau

SEQ ID NO: 393351 - RNA, 75 nt, Homo sapiens
gggcaacaugguaugacccugucucuauaaaaaaauuugaaauuagccaggcaugguggcacauacauguagccc

SEQ ID NO: 393352 - RNA, 78 nt, Homo sapiens
ucaccuucuccuuggggggcuucuggugggcgaggagcuuguaaauguuccaguuguucucgaagcuccuggaaggga

SEQ ID NO: 393353 - RNA, 95 nt, Homo sapiens
ucaaggauacuugaguagaacugguuaucuaauauuauacauuuuauauauuggguaaagauccaguuuucauucaagcacauauauuuccuuga

SEQ ID NO: 393354 - RNA, 56 nt, Homo sapiens
uguauguguuuuauguguguuuaaauaaauauguuagauacacguguauacauaca

SEQ ID NO: 393355 - RNA, 96 nt, Homo sapiens
uuaugaggacaugagauuugggagggaccagggucagaaugauaugguuuggcuugggccccacccaaaucuuaucuugaauugcaguucucauaa

SEQ ID NO: 393356 - RNA, 57 nt, Homo sapiens
aucauggggacgguuucuaaugguuuagcaccauccuucuagugcuguucucaugau

SEQ ID NO: 393357 - RNA, 105 nt, Homo sapiens
cugacgugagagaaucgcuugaacccgggaguuggagguugcagugagccgagauugcaccauugcacuccagcuugggcaacaagagugaaacucuugucucag

SEQ ID NO: 393358 - RNA, 55 nt, Homo sapiens
gaucacagugaaaacagucaauucauaagaugaguuaauuaaggaggcugugauc

SEQ ID NO: 393359 - RNA, 73 nt, Homo sapiens
gccuucucaguuuucuggggaagaaacccaagaugccugacuuucugccuuggagacugaaagaaacaagggc

SEQ ID NO: 393360 - RNA, 93 nt, Homo sapiens
uguguuguauucuugaaaacugcuuuaaagacuuuuuuugaaugggcaaaacauucacgugguucauaaggcagaaaggagaauacaaauaca

SEQ ID NO: 393361 - RNA, 55 nt, Homo sapiens
gugugauggcgcacacagggugugauggcgugcaccuguagucccagccacacac

SEQ ID NO: 393362 - RNA, 69 nt, Homo sapiens
ucccaaaaaggacaaaguauuuucaaauguaggaaaauugcaccugucugcuuguguucucauugugga

SEQ ID NO: 393363 - RNA, 55 nt, Homo sapiens
gcuacaaauauauguaugcaagucuuuuguugacauguuuucauguauuuggagc

SEQ ID NO: 393364 - RNA, 66 nt, Homo sapiens
guauuucuaguucuagaucccugaggaaucgccacacagacuuccacagugguugaacuaguuuac

SEQ ID NO: 393365 - RNA, 59 nt, Homo sapiens
auuuuggaauuuauacaguaaugguugguaaauaucaccuauugccuaaauaccagaau

SEQ ID NO: 393366 - RNA, 65 nt, Homo sapiens
uagcugguucuccaggagcuaggaucagcucagccuggcaccuaguuagcaggaggaaucaguua

SEQ ID NO: 393367 - RNA, 107 nt, Homo sapiens
agucaucuuuacaggcggauuucuuaguguuuuucauuggcagaggcaggcuuuuccuugugugaccucaaugaaaguauauuugaucauccuuagaggagaugacu

SEQ ID NO: 393368 - RNA, 58 nt, Homo sapiens
uacuuagagacaugcagcacuguagcccucaguggugagguuugcagguacucaagua

SEQ ID NO: 393369 - RNA, 76 nt, Homo sapiens
ccagucgugacgucauuguuccuggcuccugggggaaauggaucgggggccccagccgugacgucauuguuccugg

SEQ ID NO: 393370 - RNA, 93 nt, Homo sapiens
ucaaaauaauguuaaaagccaucucaaaggguuguuaugugaauuaaauacaauggcauggaacuacuuugaaacuuuuaacauacuguuuga

SEQ ID NO: 393371 - RNA, 57 nt, Homo sapiens
uggaugugacucuagagcugccuguggccguguuccuggccaccuggagaaaauuua

SEQ ID NO: 393372 - RNA, 55 nt, Homo sapiens
gaaauggaucagagcaagcuuuuuuuggucauucaucagucuucugauccauuuu

SEQ ID NO: 393373 - RNA, 57 nt, Homo sapiens
uagggugucacagugcucauaauucaccucagauuaugaaaucacugugaugcccua

SEQ ID NO: 393374 - RNA, 84 nt, Homo sapiens
cugucucauguguccgugugaagagaccaccaaacaggcuuugugugagcaacguggcuguuuauuucaccugggugcaggcag

SEQ ID NO: 393375 - RNA, 59 nt, Homo sapiens
uugcugaggcggagguugcagugagccacgaucccgccauugcacuccagccugggcga

SEQ ID NO: 393376 - RNA, 73 nt, Homo sapiens
ucugaugagaauguguuaaaauggagacucucaucauugcuugugagaguauaaauugaugcagccucucaga

SEQ ID NO: 393377 - RNA, 88 nt, Homo sapiens
gugagucacaguggaagaacugguuuccaggaguauagauguguuguggaauuuggcccugcugaccauucccucauugcugaagcac

SEQ ID NO: 393378 - RNA, 96 nt, Homo sapiens
uauuuacaacucaggcuauguggaaauggugcuacgaacacgcguguaaaaaugcuuguuugaguaccuguuuucaauuguuuuggguuagaaaua

SEQ ID NO: 393379 - RNA, 60 nt, Homo sapiens
ucauuucugguccuuaugacacuggccagaccccuccaguacaauguugauuagaaguga

SEQ ID NO: 393380 - RNA, 81 nt, Homo sapiens
aaguuaaugggugcagcacaccaacauggcacauauauacauauauaaaccugcacguugugcacguguacccuaaaacuu

SEQ ID NO: 393381 - RNA, 127 nt, Homo sapiens
uccacaaucccuugugauucaucucuuuccuccuaaggguugccaauggcucaaaguuuagacuugggauauaaaaaacgcuauucacagccuuauuaggaggaguagguggggaaggggaacugga

SEQ ID NO: 393382 - RNA, 69 nt, Homo sapiens
uaauguauuaacuaguggaauuugauuucaugcauauuuuuguauagaagucagcuuuuaguuacauug

SEQ ID NO: 393383 - RNA, 95 nt, Homo sapiens
guuugaggcugcagugaguuaugauggcaccacugcacuccaaucuggggagcugcagugcaauggugccaucauagcucacugcagccucgaac

SEQ ID NO: 393384 - RNA, 60 nt, Homo sapiens
gucucacugucaacauguauuuggggagacaucaaacucaguaugaauugacaggaugau

SEQ ID NO: 393385 - RNA, 92 nt, Homo sapiens
aguaaaaacagacccuuuuugaacaguagcuuagguguggguacacaaauacacaguuucuagacccauuguucagagaguggaguuuuacu

SEQ ID NO: 393386 - RNA, 75 nt, Homo sapiens
gggggcuccaggcgagaauguguucccgccuuucccagcgucuagaggcacccacaucccuugcucggggccccu

SEQ ID NO: 393387 - RNA, 77 nt, Homo sapiens
gugucauuuauguauggaagucaguuuguuggcucuaaaccugaggcuuacauuuucuuucauauuuuaaaugcuac

SEQ ID NO: 393388 - RNA, 66 nt, Homo sapiens
ggugugcaacuuucauuaauauuugguaaugccuuuucuuauaucccagguauugaaguugacacc

SEQ ID NO: 393389 - RNA, 78 nt, Homo sapiens
caggaucuccaaauggcaguuuauucuaaaucaacauucaauaaguguugggcauuuggaaaaaacagccaguuccug

SEQ ID NO: 393390 - RNA, 68 nt, Homo sapiens
aagucuuugcuauugugaaucaugccacaguaaacauacgugugcaugucuuuuuaguaggaggauuu

SEQ ID NO: 393391 - RNA, 112 nt, Homo sapiens
ggccuauuguucuaacccuucccauguucacauugaauuucugaugacaaagcauauuuauugucuuccauccagauuuuaagugcuguuugugggguuuugagcaguugcc

SEQ ID NO: 393392 - RNA, 56 nt, Homo sapiens
cccauaauucaaucuccucccaccggguuccucccauggcaagugggaauuguggg

SEQ ID NO: 393393 - RNA, 80 nt, Homo sapiens
gagcagucuugauuuaaucuugguuacauuuuccuagaaagaucauuugucuuagaaaucuguguagccuccaguugcuc

SEQ ID NO: 393394 - RNA, 65 nt, Homo sapiens
uagcucuauuagaagccgugggucauggaagagaaccguggaacccagcaacuaguguucagcug

SEQ ID NO: 393395 - RNA, 59 nt, Homo sapiens
cagaaggagcuaucuggcgcaucuccuuggaucuagcagugcuuguagccucacuucug

SEQ ID NO: 393396 - RNA, 94 nt, Homo sapiens
uccagaugggcaaauguuggaaauuccuugauuaggauucaguucuauugcugcucaauggggauuuucaugacuuuuggcuccauucucugga

SEQ ID NO: 393397 - RNA, 109 nt, Homo sapiens
cagaucaucaggcauuagauucucauaggcacacaaccuagaacccucgcaugcucaguucacaacaggguuugugcuccuaugagaaucuaaugcugcugcugaucug

SEQ ID NO: 393398 - RNA, 106 nt, Homo sapiens
aguuuuaauuuuauuuggcaugauugcaaauguuauuuugguuucugcauacucacuguuaguauacagaaaugggauugauauuugugugcugaccuuguaaacu

SEQ ID NO: 393399 - RNA, 69 nt, Homo sapiens
ucagaagcaguaaauacuucaauuacagcuacaaguuccucuuuuugagcugaaguauagggcuucuga

SEQ ID NO: 393400 - RNA, 102 nt, Homo sapiens
gaggcaccaguuuugcaugagaaggaugcuaguguuuuaaugggaucaaaaugacugagcggucccugaaaauuagcauuuuaacuccucucucugggccuc

SEQ ID NO: 393401 - RNA, 76 nt, Homo sapiens
ugagaaacuuuuacuagaaccuuauucagagugauuucucuuucucugagauugguucuguguuaguccauuuuca

SEQ ID NO: 393402 - RNA, 77 nt, Homo sapiens
uccucuuuacuuccucccuacuacuacgugauuggaucagaaccaaucacguagcaguagggagaaaguaaaaagga

SEQ ID NO: 393403 - RNA, 63 nt, Homo sapiens
uuuuggacuugcuccccuguccucugugccuuuccucaaagggcaccuagcacagucucaaag

SEQ ID NO: 393404 - RNA, 91 nt, Homo sapiens
ucaaaaagauaaaagauaaguauuagugaggauauggaacccuuguauacugaggguagcgguguaaauuaguacagucauuacuuuuuga

SEQ ID NO: 393405 - RNA, 62 nt, Homo sapiens
gcauagugaagcuguagguggauauggaggaugguagcccucuucucacagcucuacuaugu

SEQ ID NO: 393406 - RNA, 70 nt, Homo sapiens
aaacauacauugauaagcacuuucuaugugcuaggcgccagcacaugaugcuagguauggaugaauguuu

SEQ ID NO: 393407 - RNA, 89 nt, Homo sapiens
ggagaaucacuugaacccgggagguggauauugcagugagcugggaucaugccauugcacuccagccucggcaacaagagugaaacucc

SEQ ID NO: 393408 - RNA, 76 nt, Homo sapiens
uuuuguuuuauagguccugugagauucaugcucaaagagguucuguuuugauguguuuccaggauuuguuucaaga

SEQ ID NO: 393409 - RNA, 72 nt, Homo sapiens
uuccuccacaguggugaggugcagcagcuuccuuggcaaaugacuucugcguacucuccccacauggaggag

SEQ ID NO: 393410 - RNA, 62 nt, Homo sapiens
uguugggcauugggcuaaacucccucagggagcaccaaggggagcagaagagaugcccagca

SEQ ID NO: 393411 - RNA, 94 nt, Homo sapiens
gaugcuccugccaggagcaauggcucaugccugcaaucccaacacuuugggauguaaaagugggcacauugcuugagcccaggaguucaagauc

SEQ ID NO: 393412 - RNA, 58 nt, Homo sapiens
ggacacguagaugccgacuagcuguauggagcgugcuguucuaggcauccacgugucu

SEQ ID NO: 393413 - RNA, 91 nt, Homo sapiens
aggcaugcaauguguaauacagcaggguaaauggaguauucaucaccucaagcauuuacccuuugcauuaccaacaauccaaucauagccu

SEQ ID NO: 393414 - RNA, 98 nt, Homo sapiens
uuuuguguguaugagaacuagagaacaaggugauugaugcuaauucucaucaccauuccuaccucaccuguuuuuauuuaguuuucaugaccagagaa

SEQ ID NO: 393415 - RNA, 99 nt, Homo sapiens
agaagccaaugucggaaaaugaauccuguagauucuaauuccugcacugugugaggacuacuggugaauuauuuuccgccacaauuugcauuuucuucu

SEQ ID NO: 393416 - RNA, 67 nt, Homo sapiens
ugccuaggggugccugcaguuucugcaccacacauucugguccaguguuccucagucaccccaggca

SEQ ID NO: 393417 - RNA, 64 nt, Homo sapiens
ucccacugggggucacccuuuuuccaacaucaaaugucuggaaggguggccuccugagguggga

SEQ ID NO: 393418 - RNA, 79 nt, Homo sapiens
gguuccuguaaucccagcuaccagagaggcugagacaggagaaucauuugaaucugggaggcugagguugcagugagcc

SEQ ID NO: 393419 - RNA, 65 nt, Homo sapiens
aaggcucuuaaguucuacccaagauauacuaaaucauaucucuuggaaugagaccuaagaguuuu

SEQ ID NO: 393420 - RNA, 67 nt, Homo sapiens
uccuggagagucauuuauaguauuuuggaaaacaagucuaaaacacaaauuuguguucucauuagga

SEQ ID NO: 393421 - RNA, 76 nt, Homo sapiens
guucuuauuugcacucccaucauggugaccauaugacuacugagcaccugaaauguggugagugcaacugaggagc

SEQ ID NO: 393422 - RNA, 73 nt, Homo sapiens
gacaugagauuugggaggggccaggggcagaauaauaggguuuggauuugugucccugcccaaaucucauguc

SEQ ID NO: 393423 - RNA, 55 nt, Homo sapiens
uauugaacgugggauauugaagucucuaagagacuucaauaucccacguucaaua

SEQ ID NO: 393424 - RNA, 63 nt, Homo sapiens
ggaauaaaucccacuugauugugguauauaauuauuuguaucacacuguuggauuugauuucc

SEQ ID NO: 393425 - RNA, 58 nt, Homo sapiens
uguuucuguuguuauuguuuuggacuaaaaucagucccaguauucauuuacagaagca

SEQ ID NO: 393426 - RNA, 128 nt, Homo sapiens
agaaaguuccaugagcuguugaauaaaauguguauucugugcuuguggaugaaguguucuguauguaucuguuaagugcauuuguuccaagguauaguuuaaauccauuguuucuuuguugacuuucu

SEQ ID NO: 393427 - RNA, 63 nt, Homo sapiens
guucugugagucuugacgaauguguacagucauguaacuagcaccacaaucaagauacagaac

SEQ ID NO: 393428 - RNA, 63 nt, Homo sapiens
aagcagaggguguuaugucaauauuuaaugauagauugauauauugcaugggcuacuuuguuu

SEQ ID NO: 393429 - RNA, 79 nt, Homo sapiens
ucuaaucaguugcaagucuugaguaaagacugagguuccccaaagaaaaaggaauucuuccucgagacugcaauguaga

SEQ ID NO: 393430 - RNA, 87 nt, Homo sapiens
acauaugugugaauuuuaggcuuuuuuucccaaggugagcugaaggaagacuuauaacuagagauaguuuccaacucauacugaugu

SEQ ID NO: 393431 - RNA, 58 nt, Homo sapiens
caguucuuaugcugguggcuuccaaaccucacuuugagaaauacugccuuaggagcug

SEQ ID NO: 393432 - RNA, 56 nt, Homo sapiens
gucugguuuuuuauauccucacuugcugaacuggugccagauguaagaguccaggc

SEQ ID NO: 393433 - RNA, 65 nt, Homo sapiens
acgucucuucauuuaugcaucaaugucacuuaucauugugccugguacauggagaaaauggaugu

SEQ ID NO: 393434 - RNA, 70 nt, Homo sapiens
uguggggagggaggggugcccaaggagccacuggaguuuuaggucugaggugcaacucccucucccuaca

SEQ ID NO: 393435 - RNA, 68 nt, Homo sapiens
ggguugccauuuuaaauagauuggucaaggaaugccucuugaagaaaguaccauuugacaugggaccc

SEQ ID NO: 393436 - RNA, 75 nt, Homo sapiens
ugaacuucaauaacgccauucucucaccuugcauuuucaaacuuaaaggaggaaauggcuucuuauugugguuca

SEQ ID NO: 393437 - RNA, 73 nt, Homo sapiens
uucuaaaugcuaucuggaacauuguugcaacaagggaggaugucgcacagcaaugcaccaauggcauuuggaa

SEQ ID NO: 393438 - RNA, 60 nt, Homo sapiens
uaaaucuguucuguguagaauuaauggaacauaccuugauauuacucaguaacagauuug

SEQ ID NO: 393439 - RNA, 69 nt, Homo sapiens
ggcccaaguuucgguggaucauuccagggguuaugacgccucucugagaccacuccaaacuccagggcc

SEQ ID NO: 393440 - RNA, 82 nt, Homo sapiens
uguuuaggcaagagugacuacgugaaagaaauauuuuagggcgagcaaauucuuuuaaaggauacucuugucuacaaagaca

SEQ ID NO: 393441 - RNA, 101 nt, Homo sapiens
auaguuaucguuaucucaauuuuuuaacaguugcaugagacugaggcccagagggguucguuaggaugcaagugucuaaagagggugaggacgcaugcugu

SEQ ID NO: 393442 - RNA, 82 nt, Homo sapiens
gccauaguaauccagcaacuucuauucuccaggcagaaagagaaaggaucuuugugcuuaauaaaaagugguaugcuguggu

SEQ ID NO: 393443 - RNA, 87 nt, Homo sapiens
ccugcccccauccaagacauggggguccuauggugggauaaagacacacccuuugagucccuaagacccucagguggaugagguagg

SEQ ID NO: 393444 - RNA, 81 nt, Homo sapiens
gcugaggcaggagaauggcgugaacucgggagguggagcuugcagugagccaagaucgcgccauuguacuccagccugggc

SEQ ID NO: 393445 - RNA, 122 nt, Homo sapiens
auggaaccuggagaggguaugguuuugguuguuaucaaaauagugcaggggucuucguuugaugaaugagagaugaacuauucuugaaauaaucauaccccagucccuacccaaaaaucuau

SEQ ID NO: 393446 - RNA, 64 nt, Homo sapiens
gauaaagauagcaauagggacaaaaaguaaaauaaucucuuguguuauuauugcuauuauuauu

SEQ ID NO: 393447 - RNA, 58 nt, Homo sapiens
ugagccaugaucgugucacuccacuccagccuaggcaacaaagugagaucauggcuua

SEQ ID NO: 393448 - RNA, 123 nt, Homo sapiens
gaggaggaggccuugauggugcgcauucgagcugaucuuuucugauuccagugggaccucucucugccaaccuccacuaggagucucaaaaagacucagcccugcuucauccagacuccccuc

SEQ ID NO: 393449 - RNA, 67 nt, Homo sapiens
ggcaagaaccagggauuugcgucugagcacaaacuugacugcaggaaugggaagcccuaguucugcc

SEQ ID NO: 393450 - RNA, 61 nt, Homo sapiens
aaccaguauuggaaaccaggagaagaaccuagacugguucugguguugucaaaugcugguu

SEQ ID NO: 393451 - RNA, 74 nt, Homo sapiens
uaaagugugcgauuuaguggcccuugguacacacacaauggugugcaaccaucaccacugacuccagaacuuua

SEQ ID NO: 393452 - RNA, 69 nt, Homo sapiens
gggauacauauggagguuuguuacaagaguauauugcacgauaccaaaguuucggccucuguugauccc

SEQ ID NO: 393453 - RNA, 55 nt, Homo sapiens
uuggccauaaauaucauauuuccaauugaaaaauggaagaugauguuugggcuaa

SEQ ID NO: 393454 - RNA, 55 nt, Homo sapiens
guguuagggucaaauguguugaacuggcaaguuggagcacauuguccucuaacgc

SEQ ID NO: 393455 - RNA, 55 nt, Homo sapiens
ugucaaauugacaaaggguaaaccccaguggauuuguacuaugucaguuuagaua

SEQ ID NO: 393456 - RNA, 92 nt, Homo sapiens
gugcuacuugagcagccagucucuagaaugcugucaacagagugcccacagaauucucagaacugggagcuuaauuauacccaucauagcac

SEQ ID NO: 393457 - RNA, 87 nt, Homo sapiens
guaguguaggcauucagguuucuauuacuccaauauaguagucgcuuauuugaacugguaguuggaaaucugaauuugucugacuac

SEQ ID NO: 393458 - RNA, 57 nt, Homo sapiens
ccuggcagaaugacugcuuaaauccugagaacagauuuaucccagugucucugcagg

SEQ ID NO: 393459 - RNA, 67 nt, Homo sapiens
cuccuuacuguacaccuacaggagagccuccaccaacucuccuuuucuguagguguacaguaaggag

SEQ ID NO: 393460 - RNA, 55 nt, Homo sapiens
ggugaugcaugccuguagucucagguauuugggaggcuaaggcacgggaauuacu

SEQ ID NO: 393461 - RNA, 82 nt, Homo sapiens
aguagaagaugaauacaaagcuuucugcaaaucauuuucaaaggaaagugaugacccuguggcuuguauucacuuuacugcu

SEQ ID NO: 393462 - RNA, 89 nt, Homo sapiens
gacuuuuaugauagcuugaauguuuacuuuguuuaauacaugagcauguaguagacaguagguuaauauccacauguaguaugaaaguu

SEQ ID NO: 393463 - RNA, 55 nt, Homo sapiens
augaaggcugggacaagacaaggugaaucuaguuucuuuggucaccaguuuucau

SEQ ID NO: 393464 - RNA, 62 nt, Homo sapiens
ucuuuucuaugaucauuauguuauugcagcuuucugcuggugauauugugauuauaacaaga

SEQ ID NO: 393465 - RNA, 60 nt, Homo sapiens
uuuuauccagccucuagcaaggucuucacacauugcaaggauuuagcuggcuggguagaa

SEQ ID NO: 393466 - RNA, 69 nt, Homo sapiens
caggagucagcugugguuuaguagaaagaagauugaacuucuaguucaaagaccugguuuugaauccug

SEQ ID NO: 393467 - RNA, 78 nt, Homo sapiens
aacaaaccuccuggggagaacauaaaguguauugagaguuacagaacacuguauccuucuguccuuuuggaaauuguu

SEQ ID NO: 393468 - RNA, 60 nt, Homo sapiens
gagggcuucuuggggccacacaguguucagauuuuauauugaauguguugggaagcccuu

SEQ ID NO: 393469 - RNA, 64 nt, Homo sapiens
gggaaagaaagagaacauucguguucucaaagccaaagagaaucacuguuaacaauuucuuccu

SEQ ID NO: 393470 - RNA, 59 nt, Homo sapiens
ggucucggagaggcuaacagauucaguauggauuuuggaauguggacucuuauggggcc

SEQ ID NO: 393471 - RNA, 61 nt, Homo sapiens
ugagaccuuucauuucucagugcggccagucacaugcugcugguugagaacugaggucuua

SEQ ID NO: 393472 - RNA, 56 nt, Homo sapiens
uacagucacauuccugaccauacaucgugaaaauuguguguguguguguguuugug

SEQ ID NO: 393473 - RNA, 67 nt, Homo sapiens
caagugguuuuaucccagaaauuaauguaacuuauuacauuaauagauuaaagggaagaaccauuug

SEQ ID NO: 393474 - RNA, 74 nt, Homo sapiens
agagccugcauguggugguagccaggacaggugugggcccucaggucugcuggcgauuccaucagauguacucu

SEQ ID NO: 393475 - RNA, 94 nt, Homo sapiens
guaggcuccuucccaccucccgggcugaaaucagauuuguggucagagcuauagagaaugccugaacagcucagcugaggggaaggaagucuac

SEQ ID NO: 393476 - RNA, 94 nt, Homo sapiens
cccaaauaagaaacagagugggucccacgauguaccugucugaaaugcaaaugcagcuggacuguaaauuggggacucuuugaucucuuguggg

SEQ ID NO: 393477 - RNA, 86 nt, Homo sapiens
ucagguauuuauuuauagcaaugcaagaauggcuuaauacagaaaauugguacugaggaguggggcauuacuauuaagauaccuga

SEQ ID NO: 393478 - RNA, 68 nt, Homo sapiens
uucaauaacuauguuugaguauccauuagcacagacccuaugugagauacuagagauauaguggugaa

SEQ ID NO: 393479 - RNA, 70 nt, Homo sapiens
aagguuuggcuccguuguacaggcuggagugcagugaugcaaucucagcucauggcagccuugaacgcuu

SEQ ID NO: 393480 - RNA, 61 nt, Homo sapiens
acugaguguugauuuagauuaacuuguugauaauuucuagaugggucagucaggacucagu

SEQ ID NO: 393481 - RNA, 58 nt, Homo sapiens
guauauauuauacauuauauagcauguagugauguaugauguaauguaugauauguac

SEQ ID NO: 393482 - RNA, 72 nt, Homo sapiens
aaaagcuaagguagcauuggagaccuccuaagaauuuuauuagguggaucucaugaugauuauuuuacuuuu

SEQ ID NO: 393483 - RNA, 129 nt, Homo sapiens
uuugcaauaacaucuauggaccuugaggacuuuaugcuaagugaaauaagccagucauagagaaaaauacacugcauaauuccacuuauaugagguaucuaauauaguuaaauuuauagagucaaagaa

SEQ ID NO: 393484 - RNA, 61 nt, Homo sapiens
gcaugagaucaaauuuaagcuguuauuagcauaaaauagccuguuuuaagaugucuuaugc

SEQ ID NO: 393485 - RNA, 92 nt, Homo sapiens
guggauauggaggcugccuuauuaaauaggcuggugaaaucaguauaucaaagggauaucugcauucccauguuuauugcagcacuauucac

SEQ ID NO: 393486 - RNA, 85 nt, Homo sapiens
cuggagagugagguugucagugucauucuugcacugucuggcagaaagaauuaucugaugcugauaacuaguccugauuauccag

SEQ ID NO: 393487 - RNA, 112 nt, Homo sapiens
gcagugcauggugguguacaccuguagucccagcuacuuagggggcugagguaggaggauuaccucagcccggggaaguugaggcugcagugaaccaugaucacaccacugc

SEQ ID NO: 393488 - RNA, 73 nt, Homo sapiens
uccaggcuaggcaugugugcagacugucugugugcauguauaggcgaguguguuugcacacaugcuguguggg

SEQ ID NO: 393489 - RNA, 90 nt, Homo sapiens
ugcaugaggaggauuucagggagaaggcaaacguugagcugauaacugagacaauggaugucauucaucuguggauuguuaacaagugca

SEQ ID NO: 393490 - RNA, 55 nt, Homo sapiens
uugagauggagucucacuccuuugcccaggcuggagugcaguggcgccaucucag

SEQ ID NO: 393491 - RNA, 74 nt, Homo sapiens
gguuggugcaaaaauaaucacaguuuuugcaauuuuuuaaaaauugcaagacugcaguuacuuuugcaccaacc

SEQ ID NO: 393492 - RNA, 79 nt, Homo sapiens
cugcuggauuugguuugccaguauuuuauugaggauuuuugcauugauguucaucagagauauuggucuaaaauugugg

SEQ ID NO: 393493 - RNA, 110 nt, Homo sapiens
gacccaucaguccugcuggaccaucugugagacugguucugaacccagugaccucugucucuggggacaguuccaucuccaguggucuccaccacaggcuggacaggguu

SEQ ID NO: 393494 - RNA, 69 nt, Homo sapiens
aaaggagaauacagucccugguuggaaggugcacacagucaagucacagcuaacaacuguuucuucuuu

SEQ ID NO: 393495 - RNA, 81 nt, Homo sapiens
uggauacaugagaugguugaccagagagcacacgcuuuauuugugccguuugugaccugguccacuaacccucaguaucua

SEQ ID NO: 393496 - RNA, 59 nt, Homo sapiens
ucagaugaugucccuguucuaacccuaacuagcugugcgaccuuggaggacaucacuga

SEQ ID NO: 393497 - RNA, 79 nt, Homo sapiens
gugccuagcuacaguuguuuuacuucucucugaugauaacuuggagugaauugagagaacuguguuaaaugccuggcac

SEQ ID NO: 393498 - RNA, 118 nt, Homo sapiens
ugaguaccauaacauggcuucacaaucuacacuggcacuguguuuagaugggauuggagccaaauaauucuauuugaauugucacaggcuaaagagaaaaagaauagagauggacuua

SEQ ID NO: 393499 - RNA, 86 nt, Homo sapiens
cggcagagccuggauugaacucagcauccagggccaagggggaagcacuggcuuggccauugaugcucaguuccuccuucuugcug

SEQ ID NO: 393500 - RNA, 76 nt, Homo sapiens
ggucucuucucacaguacagggagcucuguagcuauaauagcuuuucagaguuguccaguguuggaucaagaggcu

SEQ ID NO: 393501 - RNA, 61 nt, Homo sapiens
acagcaauauaaauguacuuaauagacuuaaacaugguuaagaugguacguuuuguucugu

SEQ ID NO: 393502 - RNA, 62 nt, Homo sapiens
uguuugggggaaauuaucacuuggagucauuucauaaaucaacugugauauuuucccagaua

SEQ ID NO: 393503 - RNA, 69 nt, Homo sapiens
cuguuuauaaagccuguucacagaugucauuuuuuuaaaaacuacaucucuuugaggcaggcaagacag

SEQ ID NO: 393504 - RNA, 80 nt, Homo sapiens
cagucacaauuuuuacagcuuuugaaucaaauaugaagugccuauaagaaaaucuggaagccuggaaaaaauugugauug

SEQ ID NO: 393505 - RNA, 64 nt, Homo sapiens
augagaagugacgcagcaggguuuucagcugauggaagcucuccauuuuaugucugcuucuugu

SEQ ID NO: 393506 - RNA, 88 nt, Homo sapiens
accauaggugucggccuuacauugcuucaaauucagugugaaaacacaaaacucacacgauaaaguacaguguaaagugacauauggu

SEQ ID NO: 393507 - RNA, 92 nt, Homo sapiens
cuuccacuuuccuggaggacugaggccucugagcugaauguaaauagcauuugacacugagagccucaguaauaccuuaaguuaucugggag

SEQ ID NO: 393508 - RNA, 59 nt, Homo sapiens
ucccaccagaucccauggcaaacacugcagauuacaauuugacaugagauuuggugggg

SEQ ID NO: 393509 - RNA, 59 nt, Homo sapiens
cuuucuaagaccuuccuacuuuucuaagaagaggaaguagcuacugucuuucuggaaag

SEQ ID NO: 393510 - RNA, 90 nt, Homo sapiens
cucuuuucuuauuuauuacauaguaacauuucuaguagagaguggggccuuuguuaugucacauuuuuuaugaaauguuuaaagaaggag

SEQ ID NO: 393511 - RNA, 60 nt, Homo sapiens
gcucaaggaauacuggugguugcuauuaauauaauaguaaugauuauuauuuccuagggu

SEQ ID NO: 393512 - RNA, 56 nt, Homo sapiens
uuguacuucagacaugccaaagaccagcuggucuguguguaugcccugaguugcaa

SEQ ID NO: 393513 - RNA, 64 nt, Homo sapiens
gggucucugugcaugcgcggagcugaaagggagcguuuugcagaucuccacgcgugcgcaacuc

SEQ ID NO: 393514 - RNA, 66 nt, Homo sapiens
agaaagauuuaacucugugagcugaauccacacaucacaaagcaguuucacaggcagcuucuuucu

SEQ ID NO: 393515 - RNA, 128 nt, Homo sapiens
ugaugauuagugauguugagcauuuuuucauauacccugcauuagucuguuuaguguugcuauaacagaacaccugagauuggguaguuuauacaaaaaacgugucuauuuaacucaugguucuauca

SEQ ID NO: 393516 - RNA, 69 nt, Homo sapiens
ggucucuguugcucaggcugaagugcaguggcauaaucucagcugacugccuccugaguagcugggauu

SEQ ID NO: 393517 - RNA, 72 nt, Homo sapiens
uccuuugucagagcacugaguugugggccuuuuccgguaaggcccuuauaaaauguguucuguuuugaagga

SEQ ID NO: 393518 - RNA, 70 nt, Homo sapiens
gccuggccuaagcccaggaaugcacuucagcuccugguugagcaaugucacugaggcuugggagucgggu

SEQ ID NO: 393519 - RNA, 60 nt, Homo sapiens
gcaaucacuuugcucuccaguguggggauaucaccacaggugcagagcugaagugaaugu

SEQ ID NO: 393520 - RNA, 129 nt, Homo sapiens
gcugccuaaaccacagccugcccccagcugcugagacagcuuugcaagacauugcugauguacuccagcugcuauguaaugaacuugaaagccuguucuguagcuggcaucaggacuggugaauuaggc

SEQ ID NO: 393521 - RNA, 85 nt, Homo sapiens
cagggacuuuaaagcacuggagucaucaucuagugaugcugcuuugagcuguuagaaacgaugcuagaguuuuauuaagucucug

SEQ ID NO: 393522 - RNA, 56 nt, Homo sapiens
aggccaaauagcagguuugcuaaauguuuuaauguuguaaacugcuuccuuggccu

SEQ ID NO: 393523 - RNA, 55 nt, Homo sapiens
cauugcacuuagacaacuuuuguuucaaguguguguugaggguauaagugcaaug

SEQ ID NO: 393524 - RNA, 74 nt, Homo sapiens
guuguauguggauuuuucaacugcauggggguugacaccccuaaucccuguguuguucaaggaucugcuauaau

SEQ ID NO: 393525 - RNA, 81 nt, Homo sapiens
gauugcaauaauacuagugaauagcaggaucuuuuuuauucaagggagaaaaauuuggcugacucacuaauuguuucaguu

SEQ ID NO: 393526 - RNA, 82 nt, Homo sapiens
gaggguguucaugugccauucucauggcgcuugguuagagaaacgaccgaguggccuguguaguggggcagcgcuaacccuc

SEQ ID NO: 393527 - RNA, 123 nt, Homo sapiens
gcuuuauggccaagugugugguugauuuuagagcaugugccauacguacauaagaagaauguauauucuaccguuguuugauggacugcucuguaguugucuguuaguuccauuugguaaagu

SEQ ID NO: 393528 - RNA, 82 nt, Homo sapiens
caugucauuaucagcagcaugaaaacggacuaauacaguaaauugguagcaguagaguggaguguugcugaaaauguaccug

SEQ ID NO: 393529 - RNA, 72 nt, Homo sapiens
guugcagugagcgaagaucacaccacugcacaccagccugggugacagugugagacuuugucucaaauaaau

SEQ ID NO: 393530 - RNA, 62 nt, Homo sapiens
ucagugucaucuggguuguuuguuuaaaugcugauucccagaucccccuucagaugaacuga

SEQ ID NO: 393531 - RNA, 57 nt, Homo sapiens
agucuuugcugccuccucguauaauuucuaaaaauugaaauacaagcagcagagauu

SEQ ID NO: 393532 - RNA, 65 nt, Homo sapiens
uaggauuuuguaguucuucacaggaccuaaaaaaguccuuauggugagguauacugggaucacua

SEQ ID NO: 393533 - RNA, 73 nt, Homo sapiens
cgguguccuggagugucagaaacaguguccuggcugggugcaggaccuguaaucccagcacuuugggaggcug

SEQ ID NO: 393534 - RNA, 87 nt, Homo sapiens
ucccuccagauccuuacugcucauggucuguguuuguugcuagccauacuaauaagaguaguacauaugagacauuuaggagaggga

SEQ ID NO: 393535 - RNA, 90 nt, Homo sapiens
ggcauuagauucucauaaggagugcacaaccuagaucccucgcauucucaguucacaauagaguuugcacuccuaugagaaucuaauacc

SEQ ID NO: 393536 - RNA, 71 nt, Homo sapiens
ggugauggauauaucuauuacauugaccauggugacaguuucacaaguguauagacauguccaaucucauc

SEQ ID NO: 393537 - RNA, 103 nt, Homo sapiens
ucuugccuucagcaaucaccucagcugguucuuugccuuguagagugacucaaaacuucauuccuaaagggacuaggccaguaguuguccugcacggguugga

SEQ ID NO: 393538 - RNA, 64 nt, Homo sapiens
gcaggcuuagaacgaggucuagggguagccuccaggcacccgugacgcugucugaaaugcuugc

SEQ ID NO: 393539 - RNA, 76 nt, Homo sapiens
accgugccuggccaacaccuagcuaaguuuuguguauguuguagagacaggguuuggccauguuggucaggcuggu

SEQ ID NO: 393540 - RNA, 59 nt, Homo sapiens
ccaugaaagcaaauacaaaauggcugacuauaugcagcuaguauucacuuuuuucaugg

SEQ ID NO: 393541 - RNA, 109 nt, Homo sapiens
cugguccugccuggagccugucuacagugauaggugauagguuugugcaguguguucauugcugcaaacaggcaucugugggggcagccugcagggaggauugaaccag

SEQ ID NO: 393542 - RNA, 73 nt, Homo sapiens
cugagucuggugcgggcaaugucugaguagcuuucugugugagagcaccacaauuuccugccuaagaguucag

SEQ ID NO: 393543 - RNA, 70 nt, Homo sapiens
gccucagucaugugccuucaucuggagcugaagguggaguuagcgucaccugaaacacauggacuggggu

SEQ ID NO: 393544 - RNA, 71 nt, Homo sapiens
gugaucucagcucacuggaaccuccgccuccucaauucuccugccucagccucccgaguagcugggauuac

SEQ ID NO: 393545 - RNA, 93 nt, Homo sapiens
ucagacuucagaccgccuccaaaaaaaggauuuugauauccucuaagacuaucagaucccaauuucuggccuucaaggcuuugucuagucuga

SEQ ID NO: 393546 - RNA, 76 nt, Homo sapiens
uuguuuucaaucagccuauguugugcuuuaaagugucuauuuuuauaaggcacuacuuuaggcuuucaaaaaauag

SEQ ID NO: 393547 - RNA, 66 nt, Homo sapiens
uuauguaaaucaaucuggaaucaugacugagaaaguuaaagaaauuugagauugauuacaacauag

SEQ ID NO: 393548 - RNA, 61 nt, Homo sapiens
ucaagaugacauuuagguggggacacagccaaaccguaucacucccugagucuuagcuuga

SEQ ID NO: 393549 - RNA, 121 nt, Homo sapiens
auguucaccucgcagaguagauuaagcagcuggcaugugugaagugcccagcacugugucuagcauaugcuagguacuuggcauguguuucuuucuuucccucccuuguucaaggccacau

SEQ ID NO: 393550 - RNA, 59 nt, Homo sapiens
ucuuugucuuuaaacaucuuguucaguaaaccugcugaauacugugcaaaggauuugga

SEQ ID NO: 393551 - RNA, 118 nt, Homo sapiens
uccacuaaauuuggggaugauuuguuaugcagcaauugauaaucuauaccagaaguaauuuuuuucucugagaacuuaacuugcugcuagaaagucucaaugaugaauuuaaaaugga

SEQ ID NO: 393552 - RNA, 96 nt, Homo sapiens
augccuauugugugaauauggauuauuacuaggaccuaugugaaauuaaguauuauucuugguugaaaauucauaauauguccaugcaucuggcau

SEQ ID NO: 393553 - RNA, 95 nt, Homo sapiens
auuuucucccauuuuguagguugucuguucacucugauaguaguuucuuuugcugugcagaaguguccaacgaugauagacuggauuaagaaaau

SEQ ID NO: 393554 - RNA, 95 nt, Homo sapiens
gaauuaucuuuuagauguauuguugaauauggcuugcuaguauuuuguuggggauguuagcaucaauauucaucagauauauuggccuguaguuu

SEQ ID NO: 393555 - RNA, 92 nt, Homo sapiens
gagguauccacuuauugagcuuuuuacuuguccaauuugcuucaaauguggaacaauuguagaaugguugacuugaguucuucggaaacuuc

SEQ ID NO: 393556 - RNA, 60 nt, Homo sapiens
ucaaugcguuaggagccugcacacucccuccccgagacuccagugcaccuggcguguuga

SEQ ID NO: 393557 - RNA, 84 nt, Homo sapiens
ggagugaaacuaucucaaggguguauauagaaaggugggauuaguugguuacuuucuaaguaagucuguggggaagaagacucu

SEQ ID NO: 393558 - RNA, 58 nt, Homo sapiens
gugcacaacaugcagguuuguuacauauguauacaugugacauguugguguucugcac

SEQ ID NO: 393559 - RNA, 56 nt, Homo sapiens
ggaggacaugaccaaaacagagauaagcaaauccauguucuugcucguguaucuuc

SEQ ID NO: 393560 - RNA, 89 nt, Homo sapiens
ggagaaucgcuugaacccaagagguggagguuauggugagcugagaucgugccauugcauuccagucugggcaacaagagugaaacucc

SEQ ID NO: 393561 - RNA, 83 nt, Homo sapiens
gcucuucuucccuuggcugcaggcaucuggagauuuggggccccucuuuccaagaugcuggcagcuacagaggaagugggagu

SEQ ID NO: 393562 - RNA, 58 nt, Homo sapiens
cugggaggcagaaguugcagugaguugagauugcgccacugcacuccaaccucaacag

SEQ ID NO: 393563 - RNA, 130 nt, Homo sapiens
cuccugggcucaagcaauccucuugccucugccucucaaagugcuaagauuaggcugggugcaguggcucacgcuuguaaucucagcacuuuucggaggccaaggaggauggaucacuugaggucaggag

SEQ ID NO: 393564 - RNA, 59 nt, Homo sapiens
ugcuuuucauagaucaugcuuuuggaaaagucuuccuaaagccagcauccuggacagca

SEQ ID NO: 393565 - RNA, 64 nt, Homo sapiens
augagauuugggagggccgggagcagaaugauaugauuuugcuauguccccacccaaaucucau

SEQ ID NO: 393566 - RNA, 83 nt, Homo sapiens
cuucaggcuucucaguuuucaagcugucgauuccuaacuuggaaaaagggaugcgggagcugaaagcugagaaccuauagaag

SEQ ID NO: 393567 - RNA, 57 nt, Homo sapiens
ugagaugaagucucacucugucgccaaucuguagugcaguggugugaucucggcuca

SEQ ID NO: 393568 - RNA, 68 nt, Homo sapiens
gaaaaugagguuuugcuauaguuaaugcaucucaagauggcauauaauauagaagacuaguaguuuuc

SEQ ID NO: 393569 - RNA, 74 nt, Homo sapiens
guuucuugaaaaguuguugaaggcuucacggagggaaaaaaaauggagcauucuaacaacuuugcagaugagac

SEQ ID NO: 393570 - RNA, 61 nt, Homo sapiens
ucaggccagucagugaaguuuuucugggccacugacuagauagcccauuuguugguccugg

SEQ ID NO: 393571 - RNA, 74 nt, Homo sapiens
uucugacaaguugccaggugaugguauuccaaggaacaaacuuugagagucacugaccugguauaccuccagaa

SEQ ID NO: 393572 - RNA, 65 nt, Homo sapiens
gagguaagagggagucacacaaaauaguaagguuucauucuuauguagucauuccuuuuugcuuu

SEQ ID NO: 393573 - RNA, 70 nt, Homo sapiens
uaguagauuugaugcuguuauaagacacguuguaagacaucagguaaauauagcacaucagauuuuauua

SEQ ID NO: 393574 - RNA, 58 nt, Homo sapiens
uauucaagugaugcagcuguuuuugcuaagggucuugcaaaaggcugacgucagaaua

SEQ ID NO: 393575 - RNA, 84 nt, Homo sapiens
uugcauagauaucuggauaggaguaaaacauggacuuagaagaauguggcuucaaagucuauucuacccuuaccagcuguguga

SEQ ID NO: 393576 - RNA, 90 nt, Homo sapiens
ggagucuugcucccgucgagcaggcuggagugcaguggcgcggaccuuggcucacugcgaccuccaccuccuggguucaagcgauucucc

SEQ ID NO: 393577 - RNA, 96 nt, Homo sapiens
gcuuuuacauugucauuugaaaugcuaauucguagcuaauuguugucauuuuacacuuaguucuauuugguauugucagaggaauuauuuaaaagu

SEQ ID NO: 393578 - RNA, 110 nt, Homo sapiens
aagcccugcccaagaagccacaacccagccccaguacaggcuccuuagauuuaucugcagcaaggauuuagggacaagggucugggguugaggcuucuagggcugagcuu

SEQ ID NO: 393579 - RNA, 62 nt, Homo sapiens
aucuguguuuaaggucccagaaaauuuuugagugucuguuuucuaagaucugaaacucagau

SEQ ID NO: 393580 - RNA, 83 nt, Homo sapiens
gguuucaccauuuuggccaggcuggucucgaacuccucaccucaggugaucuguccaccucagcuucccaaagugcugaaauu

SEQ ID NO: 393581 - RNA, 63 nt, Homo sapiens
uuauuagcacccuaccauguggaagagcuuuccuucuuuauucauauuaguaugggcuaauga

SEQ ID NO: 393582 - RNA, 72 nt, Homo sapiens
auguucucaucacuucaagcagauacccucuucuucuuucucacugggaucaaagugaauuaaugagaauau

SEQ ID NO: 393583 - RNA, 104 nt, Homo sapiens
ugagcaugguggugcuugccuguaguuccagguacucagggggcugaggcaguaagaacacuugagcccaggaggccugggugacagaguaagacccugucuca

SEQ ID NO: 393584 - RNA, 63 nt, Homo sapiens
gagguaagaugauucguguccuuaugaaugaaugcugauauuaagggaugaauuaguuaucuu

SEQ ID NO: 393585 - RNA, 112 nt, Homo sapiens
ggacaaugcaaugugacucagaaaaucuguuuauucauccuguuucaccaauuccuaguugggugucauggggaaaauaacagacuucucaggaguuaaguuuucuuugucc

SEQ ID NO: 393586 - RNA, 89 nt, Homo sapiens
cagugcucuaaccauaaaacuacaucguuaauuuauuuucagcuacaauuaacuuaaauucaaugaaugaugguugguauggugcgcug

SEQ ID NO: 393587 - RNA, 56 nt, Homo sapiens
gcuucacuuggcuaggaaagggaauuccccgaccccuugcacuucccaggugaggc

SEQ ID NO: 393588 - RNA, 79 nt, Homo sapiens
cccucggccacccuuccacacccuggguacccaccuucugacccuggugugccuguggugggaagaggcugagccaggg

SEQ ID NO: 393589 - RNA, 105 nt, Homo sapiens
cccccaagucuuuuuacugauacaaaauauuuuacauguuuauggggguacauguauuuuuuauguacauaaaauguauaaugacugagucagagccuuuggggg

SEQ ID NO: 393590 - RNA, 130 nt, Homo sapiens
aaagguuccuuuuccaauuguggggguuagugagacaaaguguaugaaaagcauaaacgcugaagugccauguugguauugcuuagcaacacuuuguucacacugucacguauugcacugcauuuccuuu

SEQ ID NO: 393591 - RNA, 71 nt, Homo sapiens
ucacuucuucugugauucuucaguuacuucaggccaucuggauguauacaugcaggucacaggggauauga

SEQ ID NO: 393592 - RNA, 73 nt, Homo sapiens
gaagacuaguuucgacacccugagggaggaauugcuuggcuccagaacugagauguguccagaucuaguuuuu

SEQ ID NO: 393593 - RNA, 89 nt, Homo sapiens
aaaauggguacaugaaaagaaacaucaucucuucauuaauugaugcaaugauggcuggaagagaugcuguuaucaacuguagccauuuu

SEQ ID NO: 393594 - RNA, 80 nt, Homo sapiens
acagagacaaacccuguuacuucucuggaaugcucguuagcaucuaauauagcacugagaauguaauuccuguuuacugu

SEQ ID NO: 393595 - RNA, 83 nt, Homo sapiens
aaaagcuaggugaagaagucagagcugugaguuaagucaccuaagguuugacauagagccuugacuucauucaagaugcuuuu

SEQ ID NO: 393596 - RNA, 110 nt, Homo sapiens
auuucuugggaaaaaaagggaggcuuauggaauguuauggcuuuaaucuuuuuccuuagggaugucugagaugggcuauauacaugcugucuuucuuugauauaagagau

SEQ ID NO: 393597 - RNA, 66 nt, Homo sapiens
uggccucccaaaguguugggauuacaagugugagucaccgugccuggucccaugaacuuuagguca

SEQ ID NO: 393598 - RNA, 74 nt, Homo sapiens
uauccaggaauuuauccauuucuucuagauuuucuaguuuauuuguguagagguauguauaguauucuuugaug

SEQ ID NO: 393599 - RNA, 110 nt, Homo sapiens
uucacugauaucuuuguuacuuugcauuucuguaguacagucaugcauugcuuacugauggggauauguucugagaaaugcauuguuaggcaauuucauuguuacgugaa

SEQ ID NO: 393600 - RNA, 64 nt, Homo sapiens
uuugguuugccaguauuuuguugaggauuuuugcaucgauguucaucaaggauauuggccugaa

SEQ ID NO: 393601 - RNA, 86 nt, Homo sapiens
uguggguacaaaacagguguauuuucuguagagaauuuugaaacaauaauaaagaugacugaaagguauacgcuuguuauccuaca

SEQ ID NO: 393602 - RNA, 65 nt, Homo sapiens
ggagcagaaggagccccugaugcuuuagaugaaagauuccgucugcaaaguggcuaccuugcucc

SEQ ID NO: 393603 - RNA, 55 nt, Homo sapiens
cugagaucaagucuugcucuguugcccaggcuagagugcaguggcuugagcucag

SEQ ID NO: 393604 - RNA, 70 nt, Homo sapiens
ugcuuauuuuuauacuaguaccaugcuguuauggugacuauggccuuacagucuaguuugaagucaggua

SEQ ID NO: 393605 - RNA, 84 nt, Homo sapiens
ccagauuuagugugcaaagaagaaacucuugacuucaauguugugaggucauggauugucuuuucuugucauugacuuuuuugg

SEQ ID NO: 393606 - RNA, 94 nt, Homo sapiens
gaggcagaagaaucgcuugaacagguggagguugcagugagcugagguggcgccauuguacuccagccugggcaagagagugaggcucugucuc

SEQ ID NO: 393607 - RNA, 69 nt, Homo sapiens
gagauucugguauguugucucuuuguucucauugguuucaaagaacuucuugauagcugccuuaauuuc

SEQ ID NO: 393608 - RNA, 73 nt, Homo sapiens
agaagugaaauacuuaauuucuccaugcugguuacacugcaccaggaccagggccaauugguacuuuccuuuu

SEQ ID NO: 393609 - RNA, 68 nt, Homo sapiens
gagguggaguuggcacugagcugugauugcaucacugcacuccagccucagugacagagccagaccuu

SEQ ID NO: 393610 - RNA, 90 nt, Homo sapiens
cagaguuuuccauuuuguaucuauuuauguuuggcauuuaauuguugcugaaaacuuuauguaaguacaugcuagauggaauggcuucug

SEQ ID NO: 393611 - RNA, 72 nt, Homo sapiens
aucuuuauagcagugugaaaauggacuaauucaguaaauugauagcacagaguggggcgcugcuauaaagau

SEQ ID NO: 393612 - RNA, 58 nt, Homo sapiens
uggaugacauccuuguaugcagacccacuaaagaggccucagauaagaauguuauuca

SEQ ID NO: 393613 - RNA, 93 nt, Homo sapiens
ccuuuguggaagacaguguggugauuccucaaggaucuaaacuagaauuaauauuugacccagcaaucccauuacugcuuauauacccaaagg

SEQ ID NO: 393614 - RNA, 56 nt, Homo sapiens
ugguaucauuuuaucugcucuaugucagguacagagaggagacgaggagugaacca

SEQ ID NO: 393615 - RNA, 72 nt, Homo sapiens
uucuugauuaggaggacuuuaugguggcaaugcaaggacuguccuuauguuuuggagguccucacuagagaa

SEQ ID NO: 393616 - RNA, 76 nt, Homo sapiens
agugcuguucccagguugcugauggucugggggugcggaucugcaauccaaaucucuggcacugggauguggcacu

SEQ ID NO: 393617 - RNA, 59 nt, Homo sapiens
aguugauuuguagaaugccccaacagaugauuuuguuugguguuacuucaugaucaauu

SEQ ID NO: 393618 - RNA, 68 nt, Homo sapiens
guaccuuaagcuaagugaaauaagucagucacgaaagaauacugugugauuccacuuguuugagguac

SEQ ID NO: 393619 - RNA, 103 nt, Homo sapiens
ggccucugcacgugccucccuguggcuagaaugaagguagcugaacuagaauuaugucugaaucuucuagcuuuccuuuuggccaggcugccacccagaggcu

SEQ ID NO: 393620 - RNA, 60 nt, Homo sapiens
uggcaaaauauuuugguuucugcuguaaaguguaugcaguaaagccuaagauauuugcua

SEQ ID NO: 393621 - RNA, 65 nt, Homo sapiens
aaugaccagcauguuuauuuaguacauaauuauauguguauacugucuaauauguuguguucauu

SEQ ID NO: 393622 - RNA, 89 nt, Homo sapiens
gaaggcaguggugaaggcagcgguggcugcuacaucaguaaagcucuuggcuuauuauuagucggccagcuguuaaacuauuuucuuuc

SEQ ID NO: 393623 - RNA, 67 nt, Homo sapiens
gggacaucuuucuagucagggucaaaauacugagaaguuauuucccaguggcuagagcagauauccu

SEQ ID NO: 393624 - RNA, 121 nt, Homo sapiens
guugaagguugguagaauuaaguggccuucagggcuuuugagcugagaugguguuaacaauguuggcuucagcaucaaaccauccacucgugagcuuuggcaucuuaaaugagucuuuaau

SEQ ID NO: 393625 - RNA, 82 nt, Homo sapiens
gcugcucucacugagaauggguucuaagcacccugggcuuugccucacuugcuccaguuucagaaucccauguggaagcagc

SEQ ID NO: 393626 - RNA, 80 nt, Homo sapiens
uagauuggaaaucagagugaaacaugggagauuagaggcagcugugucucccagggccgccugauggauuccagcaucug

SEQ ID NO: 393627 - RNA, 75 nt, Homo sapiens
cauuuggauucuaugguuuauuuccaagugugggagacauacugacacaauaaaauaaaccuaggagagaaaaug

SEQ ID NO: 393628 - RNA, 86 nt, Homo sapiens
auccuuucccaaauaagaaggcaugaguucagaggguaugauuuucuauccaucuugauugugcuguuuuaaaaccagaaagugau

SEQ ID NO: 393629 - RNA, 120 nt, Homo sapiens
ggcguuauuucaaauucauauaaaggguacuucuuacaaaauagccucuaccaaagauacauuuugagcauguaucuuugguagaagcuauuuuauaagaagauggagaggcuaacagcu

SEQ ID NO: 393630 - RNA, 55 nt, Homo sapiens
uugguccguugugaaaaggccucaguaacuuuuuagguuuguucugauggauuaa

SEQ ID NO: 393631 - RNA, 55 nt, Homo sapiens
gcuucucuaguugccuggagcauaguaauaugauuuuccagcacauuagggaagc

SEQ ID NO: 393632 - RNA, 95 nt, Homo sapiens
gaaagagcaauuugagaacaaagcuacuuucccuucauucuaauaccaugagaauucaacauaugggguaguuacuguuguucuuuuguucuuuu

SEQ ID NO: 393633 - RNA, 56 nt, Homo sapiens
gaggugggcggaucaugaggucaggagacagagaccaccgggugaaacccuaucuc

SEQ ID NO: 393634 - RNA, 56 nt, Homo sapiens
aggauuagagacuucucuaccucaguuuuaacugagaguuuuauggcuuuaauucu

SEQ ID NO: 393635 - RNA, 78 nt, Homo sapiens
uguuuuggagaacaguucgugugcuaaugaaaagaauguaaauucugcaguuguugcauagaauguucuguaaauaca

SEQ ID NO: 393636 - RNA, 85 nt, Homo sapiens
gauuuugaaagacuuucugcuguggauaaaaugcucucaaacagcaucauaugcuacagagaaaucuuucaugaaaggaagaguc

SEQ ID NO: 393637 - RNA, 77 nt, Homo sapiens
ugcacacaguggucaauggguuguugugacagcuguagggcugcaaucaucgcuguuggccacugcaaaccccugca

SEQ ID NO: 393638 - RNA, 65 nt, Homo sapiens
gucucacagcuagcugcuuuauuauauguagggaaaccuggcaaaccaagcaguaguuguggggc

SEQ ID NO: 393639 - RNA, 130 nt, Homo sapiens
acuccugggcucaagcaaucugcccacguaggccucucaaagugcugggacuggcugggugcgauggcucacgccuguuaucuuaucacuuugggaggucgaggugggaggaucuuuagaggcaaggagu

SEQ ID NO: 393640 - RNA, 80 nt, Homo sapiens
ggagaaggagaaaggauuguguagucuuacugcuugcauuuauucaaaugcaagggggagcuaccagccuucccuccucc

SEQ ID NO: 393641 - RNA, 58 nt, Homo sapiens
ugagauaucauuucacacccaguaggauggcuguaauuuuuuuugagauggagucuca

SEQ ID NO: 393642 - RNA, 75 nt, Homo sapiens
aagggaucacuuuuacacuguuggcaggauuguaaacuaguacaaucacuauggaaaacaguguggagauuccuu

SEQ ID NO: 393643 - RNA, 74 nt, Homo sapiens
uagccucacaaagugcuuaagauuacaggugugagccaccauaccuggccuauuauuacuauuuuuguaggcua

SEQ ID NO: 393644 - RNA, 72 nt, Homo sapiens
agggggccaagugcuuaaaauuucauuuuggagcuuacccgauuguaaauuagaaagcauugucaucucccu

SEQ ID NO: 393645 - RNA, 111 nt, Homo sapiens
agcagccacacaaaaaacagggcucuggccucucugauugcccagagugaugacuguguuuucacauucaagggauuucaggaggcuaaaaggaucuuuguuuuuucugcu

SEQ ID NO: 393646 - RNA, 81 nt, Homo sapiens
uuuuuaucagucaagguccuugaggaaacagaugugaccaauagguuacagauggcacacucaaggggugauugaugagaa

SEQ ID NO: 393647 - RNA, 99 nt, Homo sapiens
ugcguacauuauguguguacacccccucugagguuauucguaauauucuaggggaauguugcugcuaaugucacagggagaguacaccauguguaugca

SEQ ID NO: 393648 - RNA, 56 nt, Homo sapiens
ucuggagcugcgggugggaaggagccagacccugcccuugcuccccuuguucuaga

SEQ ID NO: 393649 - RNA, 98 nt, Homo sapiens
gaggcaggagaaucgcuugaacucggcagguggagguuguagugagccgagaucacgccacugcacuccagccugaugaaagaguaagacuccgucuc

SEQ ID NO: 393650 - RNA, 80 nt, Homo sapiens
ugcagccuagggacuugguacucugugucccagcugcuccagcugugacugaaagaggccaauguacagcuugggcugca

SEQ ID NO: 393651 - RNA, 81 nt, Homo sapiens
uuguacucuucacagucuggguuuguuuguacuugccuuucuuguggacagguacaaacaagcccagacugugaaggacaa

SEQ ID NO: 393652 - RNA, 83 nt, Homo sapiens
auuagaugagauauuuuauaagaucauuuuagagguggacuuuguucauguauacguguuuuaugauaaauaucuugccuagu

SEQ ID NO: 393653 - RNA, 63 nt, Homo sapiens
gacaaauuuguaaauggguauucagugggaagugacugaacaaaaccauucaacagauuuguc

SEQ ID NO: 393654 - RNA, 106 nt, Homo sapiens
gacaaggaacaaauucucccucggaggcuccagaagaaaccaaccaugccaacaccuugauuuuggucuucuggccuccagaaccgggagagaauauauuucuguu

SEQ ID NO: 393655 - RNA, 63 nt, Homo sapiens
gguuuuaaaacuguuuaguacauuaaguuacuaaugcuuaaaaaguuagaugguuuuaaaacu

SEQ ID NO: 393656 - RNA, 64 nt, Homo sapiens
auuguggauagugcugcaauaaacaugugugugcaugugucuuuuuagcagcaugauuuauaau

SEQ ID NO: 393657 - RNA, 69 nt, Homo sapiens
ugugaugugcauguguaugugcaugugauguuguauguucaucauguguucaucacagcacaauucaca

SEQ ID NO: 393658 - RNA, 55 nt, Homo sapiens
uguguagagaaauauuacuuaugacccauccugggcagugauauucucuuacaua

SEQ ID NO: 393659 - RNA, 65 nt, Homo sapiens
cuacaguaugaaaccuuuacucucuauacuaugcaugauauaauggaugagggguucguauguag

SEQ ID NO: 393660 - RNA, 79 nt, Homo sapiens
uucuccagaacucugccuacugguuggaggaacagugcugaacccaaaaugauuaacuguuuuaggcaaggcuggagaa

SEQ ID NO: 393661 - RNA, 89 nt, Homo sapiens
gccuuugguuuggaaaccuuguagccacagguggcgagaaaauuuaagagcacuuggguggcuugauggcacaagguuucugaacgggu

SEQ ID NO: 393662 - RNA, 93 nt, Homo sapiens
caggaaacauguuuggaaagaucagcuaaauguaaguuggugacucccacgcagcuaaaauuguguacauuggagccugauuuucuuuuccug

SEQ ID NO: 393663 - RNA, 93 nt, Homo sapiens
aagaaaguagagaugcuagcagagaaaugacuuacaagagaaugcuaauagugauuaucucuguggguagugcugaaugauuucuauuuuuuu

SEQ ID NO: 393664 - RNA, 59 nt, Homo sapiens
cuuaccagucuagggcucaguuucuucaucuacaaaggaagggaguugggcuaggugag

SEQ ID NO: 393665 - RNA, 118 nt, Homo sapiens
aaaauuugauuuucuuauuguauuuucuaucucaguuaaugacccuaugccccuacuuacacaagaucagaagcaugagggccauuuauugagguauauauuuaucuaaugaaauuuu

SEQ ID NO: 393666 - RNA, 66 nt, Homo sapiens
uuuucuugucuguuccaaagggcaagcagcuuuuuucgucuguuugcuguguggaguagcagaaaa

SEQ ID NO: 393667 - RNA, 82 nt, Homo sapiens
acguugaucugcucgguggggaaggccccgaugcccacacgugugguauaggcuuucaccacgccauacacgucaccuaugu

SEQ ID NO: 393668 - RNA, 87 nt, Homo sapiens
ggagucuugcucuguugccuaggcuggagugcaguggcaugaucucggcucacugcaaccuccgccucccgggucaagcaauucucc

SEQ ID NO: 393669 - RNA, 64 nt, Homo sapiens
ugucacugugcagucaugcauucugugaugagguuucggucaaugccggacuguacauauggca

SEQ ID NO: 393670 - RNA, 89 nt, Homo sapiens
guauguguauuguuguaucuaccugcagauauguaugucuuauuguaucuacauguagguauguauguauacuuuuaauguacacauau

SEQ ID NO: 393671 - RNA, 100 nt, Homo sapiens
uucucaaaaaaaacugaagcaauggacuaaaauuuggagagcuaagauuuuuagaauuuuagcucauucaauuucagucaaaaacugccacucuugggga

SEQ ID NO: 393672 - RNA, 71 nt, Homo sapiens
accguguagauaucauuagugcugugccacgcugacacucggucaguaccauguagauaucagugcacggu

SEQ ID NO: 393673 - RNA, 67 nt, Homo sapiens
uaguuuaauggaaauagcauugaaucuauaaauuacuuuggguggaauggccuuuuucauuauacug

SEQ ID NO: 393674 - RNA, 76 nt, Homo sapiens
uuaccacuuucagguccagucacuggucugcaguaaccauuuugugcaagacacuguccugggcaugaagggguga

SEQ ID NO: 393675 - RNA, 75 nt, Homo sapiens
cauuuuuaaaauaauaguauuuggauguuggugagcuuggagugaagcuggcaccauacacuguuguugagagug

SEQ ID NO: 393676 - RNA, 63 nt, Homo sapiens
aguuauuucuuuggaaccggguuaugaguggcccucacaugagucuguuccaaagaaauaacu

SEQ ID NO: 393677 - RNA, 86 nt, Homo sapiens
aggauugcuugcaccaaagagguugaggccgcagugagcugugaucaugccacugcacuucagccugggaaacagagcaagauccu

SEQ ID NO: 393678 - RNA, 84 nt, Homo sapiens
ucuuuaagcgaggaaaauuugugacgaccuuguauguuauuuagaguucuaaauguugcacagugcuuucuuugccccagaaga

SEQ ID NO: 393679 - RNA, 65 nt, Homo sapiens
augagauuugggaggggccaggaguggaauaauaugguuuagcuuuguccccgcccagaucucau

SEQ ID NO: 393680 - RNA, 70 nt, Homo sapiens
guaauuuauguuugacuacaggcuauauugggaagaaauauaugcuaauuuuuagucgagcauuguuugc

SEQ ID NO: 393681 - RNA, 74 nt, Homo sapiens
guagguguugauuagauccaguugauugaugaugcuguucaguucaacgguauccucacugaaauuucaccugc

SEQ ID NO: 393682 - RNA, 60 nt, Homo sapiens
uauguguguacauggcuuuuauaacaagaaaugggagaaccuaaagcuauguaacauaua

SEQ ID NO: 393683 - RNA, 76 nt, Homo sapiens
ucacuugagucugggagguugaggcugcagugagucgugaucacgccacugcacugcagccuggccaaccgaguga

SEQ ID NO: 393684 - RNA, 66 nt, Homo sapiens
ucacuacugucagacugccacugauacuuauucaggccugagaucacuuuagucagacagugguga

SEQ ID NO: 393685 - RNA, 67 nt, Homo sapiens
acuuggggugugagggagaaagaaagaggguguuccccccuuuucuuuucuaucuccauccccgagu

SEQ ID NO: 393686 - RNA, 78 nt, Homo sapiens
gauuauuuuuaagggagacuuuacaagcauuaacaacuuguuugacuguuuuuguaaaguucucucccgaaaacaauc

SEQ ID NO: 393687 - RNA, 62 nt, Homo sapiens
ucaccauuucaagugcugucuuagcugugacugguuuucagugacacuaaccacuuggguga

SEQ ID NO: 393688 - RNA, 87 nt, Homo sapiens
ugucgaaguugcccaggauggcagugcagccccuggcugagguguagcagucauugauacuagccaucaugagcagcuucuuggaca

SEQ ID NO: 393689 - RNA, 66 nt, Homo sapiens
cauucauucauucaacagcugauggauauuuggguucuuucuacucuuuggcugugaagaauaaug

SEQ ID NO: 393690 - RNA, 57 nt, Homo sapiens
uauuuaaggagagcuuuauuuuaaggcauguuugacucaaaaugcucuucuggaaua

SEQ ID NO: 393691 - RNA, 72 nt, Homo sapiens
aggaaugcuuuuacacuguuggugggaguguaaauuaguucacccauuguggaagacaguguggcgauuccu

SEQ ID NO: 393692 - RNA, 68 nt, Homo sapiens
uagucauuauucagauguguaugugcacuuuuaccucuggcuaugcucauaugcaacuuauagugcug

SEQ ID NO: 393693 - RNA, 98 nt, Homo sapiens
cauggaaacuaucuagaucuaguccauguuuauuuguuugacucuuucuccaucuagguuauagguuucuacaggacuauggucuauuagucacuaug

SEQ ID NO: 393694 - RNA, 82 nt, Homo sapiens
aagagggugagguuuucauugguacaaauagacagcaucauguauaugagauguuuguuucagugccuuaaaucacuuuuuu

SEQ ID NO: 393695 - RNA, 74 nt, Homo sapiens
ugagcauuuuaauaaaggggcuuagaaaugaguagaauuucacuagccagcccuuuauuauaauagauuguuca

SEQ ID NO: 393696 - RNA, 61 nt, Homo sapiens
gcaguaccagcucacgagucucgaacauuuaccuggugcugagaccugaucuugguacugc

SEQ ID NO: 393697 - RNA, 97 nt, Homo sapiens
uuccuguggcgugccguuuuacaguaguaucuucauuuguugauucauucacucagucaacauuuaguaaauauuaugugacaggcagccaugggaa

SEQ ID NO: 393698 - RNA, 101 nt, Homo sapiens
aaacugagcacguaagucccauagcuaguucguguuugaacuagaucugaauuccagauguauuuccaacugaaugaucugucuaauauacuguucuguuu

SEQ ID NO: 393699 - RNA, 84 nt, Homo sapiens
accucaauagagucauuaaggcauucuuugucuucauggcagugaccaggagagaacugaugucuuuaaagaauuccaaggggu

SEQ ID NO: 393700 - RNA, 65 nt, Homo sapiens
caccccuaccugagucaggaguggagauuagcccaaauuaaagcucuggugacucaggagaggug

SEQ ID NO: 393701 - RNA, 74 nt, Homo sapiens
gaacucacucuuaagaccucugggggccucaguguucucuuuuguaaaaugaggagguguugagaugaaaguuc

SEQ ID NO: 393702 - RNA, 81 nt, Homo sapiens
ggaacacgguacccuagagggcuggcauagucugagcacuugcuguccucagcguguggacggccaucuucuuuguguucc

SEQ ID NO: 393703 - RNA, 64 nt, Homo sapiens
agucuuacaauauauguuugugugugugugucugccuacuuucauuuagcauguguuugagauu

SEQ ID NO: 393704 - RNA, 55 nt, Homo sapiens
ggaggcagucugucccuuagcagagcucaaguacugugcugggagaucugucuuc

SEQ ID NO: 393705 - RNA, 60 nt, Homo sapiens
ccuaaccuauaguauugaaaucaagucgauuuuugucauuugaaguaacuaaggguuggg

SEQ ID NO: 393706 - RNA, 72 nt, Homo sapiens
uagagauugggaggcaauaugagggaggcuucuggggugccggaagugaucuauuucuuuccuugaucucug

SEQ ID NO: 393707 - RNA, 56 nt, Homo sapiens
ugaauagugcugcaauaaacauaugugugcaugugucuuuauagcagcaugauuua

SEQ ID NO: 393708 - RNA, 58 nt, Homo sapiens
aggaguguacuuuggucuuuugauacuauucucuugauagugaucacagucgucuccu

SEQ ID NO: 393709 - RNA, 104 nt, Homo sapiens
aauuaaguaaauggauggguaugagccaguuuucucacuguugcagucagaauuuacagauaagcaaagggagaaggcuagaaauauuuaugcaguaauugauu

SEQ ID NO: 393710 - RNA, 56 nt, Homo sapiens
ggauauguagggcauaucuacauacuaaaauauguagcacuaugcacuacacaucu

SEQ ID NO: 393711 - RNA, 78 nt, Homo sapiens
cucuuugaucaucagcuuugucaucuguaaaaugggcauucugccuacuucaaagagaaguugaagggauuaaacgag

SEQ ID NO: 393712 - RNA, 82 nt, Homo sapiens
aguuuuaggguacauaugcacaacgugcagguuuguuacauauguauacaugugccaugcuggugugcugcacccauuaacu

SEQ ID NO: 393713 - RNA, 67 nt, Homo sapiens
aaugucuuaucauuucuucuaguuuuucugaggaugucagauuauuggguuaaaggauaugaacauu

SEQ ID NO: 393714 - RNA, 58 nt, Homo sapiens
gcuuugggauuccuuauuuuuggaugaguggcuuugaaagugaauguaucccguaagu

SEQ ID NO: 393715 - RNA, 69 nt, Homo sapiens
ccugagggaugccugguuuguuuucccucaugaauaauaccuuucagaagcacagaccagaucuccagg

SEQ ID NO: 393716 - RNA, 96 nt, Homo sapiens
uuggggaauaaaacugaacugcaguucaguguuggaaugaaucagacuacagagguugcuucauucaacauugaggggcagucaaagguucucuag

SEQ ID NO: 393717 - RNA, 70 nt, Homo sapiens
uccucuugcuauuuguuuucaaugugucauucaguggugggcugaaauguuaaacaaguggcucugaggg

SEQ ID NO: 393718 - RNA, 85 nt, Homo sapiens
aguuucgugaauguuuuggucuuucacagcaggccuuucuuuuucccugaugaugaaacacauccaaugcagaauucauagaacu

SEQ ID NO: 393719 - RNA, 59 nt, Homo sapiens
gggaaggagcacaggacuuugauuaucauaagaugugaaaauacuacugucuucuuccc

SEQ ID NO: 393720 - RNA, 64 nt, Homo sapiens
gcaaagcaucacauaauggaucauggcccauaauaauaauggccaucauuugcugaaugcuugu

SEQ ID NO: 393721 - RNA, 82 nt, Homo sapiens
agugguuacuuguuguggauuaaauuugcauuucccugaugacuacugaugcugaauucauuccauaugcuuacuaaccauu

SEQ ID NO: 393722 - RNA, 76 nt, Homo sapiens
cuggccucucucagucaguuuucugaagugacagcacuaagcaacuguucuugguuuauugauggagaggagccag

SEQ ID NO: 393723 - RNA, 78 nt, Homo sapiens
uguaugugugguuuaagaauugaauucuggaaagauaccggaauugcauaaacacauuucuuaugaccugcguauaca

SEQ ID NO: 393724 - RNA, 88 nt, Homo sapiens
ucuagcacccagaucuuggguuagcaauaccauucuccaaaggcaccagucuccuuugagaacuggcugauucaaggacuggagcaga

SEQ ID NO: 393725 - RNA, 87 nt, Homo sapiens
gagaucuccauaaguggccagcuuuaauuuguaugccucagggguucacaggacuguaaauggaaaugaagggcuggcccuggucuc

SEQ ID NO: 393726 - RNA, 75 nt, Homo sapiens
agguaguuauuuguacaggaguguaagcuucaugagggcaggaaccuugucguucugcauuccuggugccuaucu

SEQ ID NO: 393727 - RNA, 80 nt, Homo sapiens
ugaggcaauucugauggaguaguccacagauccacuuugaagacacuaucugccuauuaccauaagaggaaccagccuua

SEQ ID NO: 393728 - RNA, 76 nt, Homo sapiens
ucacuugaacccaggagguggagguugcaguaaguagagauugugccacugcacuccaccuugggcaacagaguga

SEQ ID NO: 393729 - RNA, 129 nt, Homo sapiens
auucauaguauggcuguuuucccacuggagggguuuuaccuucguauucuuucuuacguaagcaucaauaaggaagaaugggcaauagaacacuccuccuuaagauuccgcaugguucauacuaugggu

SEQ ID NO: 393730 - RNA, 71 nt, Homo sapiens
uaguguuguucuaugcagagaauaccugacgauacuuguuuucugagguaggugcauggauacacaaacug

SEQ ID NO: 393731 - RNA, 72 nt, Homo sapiens
cuaucuuauucuccucaacugugaaacgggugaauguucaucucacaggguuauugagggggauugaauuag

SEQ ID NO: 393732 - RNA, 78 nt, Homo sapiens
cuugccugggccugguuccucuggugauugucauggaagugacacagcaagauggaaccauuccaacaaaccagcaag

SEQ ID NO: 393733 - RNA, 102 nt, Homo sapiens
gguuuauuauagauuuagggaguacaagugcaguuucguuacaugugaauauugcguaguggcgaagucugggcuuuuagugcagccaucacuaguguagcc

SEQ ID NO: 393734 - RNA, 73 nt, Homo sapiens
uggggucaggaguucaagaccagccugggcaacauggugaaaccccaggcaacaugguaaaacccugucucua

SEQ ID NO: 393735 - RNA, 109 nt, Homo sapiens
ugcagccaggacgucugaagaaaguucagggcauuggcugguaccuggaugagaagaaccuggcucagguguccaccaaucuucuggacuuugaggucacggcacugca

SEQ ID NO: 393736 - RNA, 55 nt, Homo sapiens
gggagccuauagagaggaggucauauacuaguugauuuuggacuaaaggcauccc

SEQ ID NO: 393737 - RNA, 91 nt, Homo sapiens
uuuuacuauguaacaauuucuuuauauauccaugacagcuaaaacaagcuauuugguuagucuguguguauauauguuuuugcaugugaaa

SEQ ID NO: 393738 - RNA, 77 nt, Homo sapiens
cagagaagauaugcauauauuuauacauuuauguacauaacaucacuguguauguauaugcaggguguuuuacuuug

SEQ ID NO: 393739 - RNA, 66 nt, Homo sapiens
ucaguuaaugaguugagauaagguuacauuuuguagacauuugaugaaccuauuuuaacuuccuga

SEQ ID NO: 393740 - RNA, 75 nt, Homo sapiens
aaauacggguauaagaagugaaccagacgucuuuaagaaagaguaugucugcuacucuuguuuccaaaaguguuu

SEQ ID NO: 393741 - RNA, 69 nt, Homo sapiens
uuggagccagggagguggaggcugcagugagcugauaucacacuacugcacuccaguuccgggcaacag

SEQ ID NO: 393742 - RNA, 74 nt, Homo sapiens
gcugaaucacauucaucaguuuuuuauaugugauguuauauuucauucaucacacaggaguuugauguuucagc

SEQ ID NO: 393743 - RNA, 95 nt, Homo sapiens
cgggccacaucgcaucuccaggugccagcugcgcccuccgcccugcccuuccccccggaggcggggccgcaccuggagaugcggauccggucccg

SEQ ID NO: 393744 - RNA, 68 nt, Homo sapiens
cuucauaaucaugucugaaaccuuugauauacugaguuguaaacagugucuuuggacaagauuugagg

SEQ ID NO: 393745 - RNA, 74 nt, Homo sapiens
acauggcauuuaucaaauaaaauuuauguauguggacauuuuauuuacaugcauauguuggaagaaagccaugu

SEQ ID NO: 393746 - RNA, 100 nt, Homo sapiens
gaggcaggagaaucgcuuuaacccuggaggcggagguugcagugagcugagaucaugcuauuguacuccagccuaggcaacaagagugaaacucugucuc

SEQ ID NO: 393747 - RNA, 78 nt, Homo sapiens
uuugauacaucaaucagauggcuaaaacagaagauaugugagucuauuaucuuuugcugucugauaugauaggucaga

SEQ ID NO: 393748 - RNA, 58 nt, Homo sapiens
uguggcaaacucagcaugccccagaaauucacccuucuugcaggcccaguuugccaca

SEQ ID NO: 393749 - RNA, 56 nt, Homo sapiens
guauugacuaucaaucaugugcccaaugcuguggaagcaugauagacauuuaauau

SEQ ID NO: 393750 - RNA, 71 nt, Homo sapiens
gugagggggacuaguaagauaauauaaacaggaguuuauccaguaaguauuguacuacaagcucuuuauac

SEQ ID NO: 393751 - RNA, 99 nt, Homo sapiens
gaggcaggagaaucauuugaacccgggcggcagaaguugcaguaagccaaaauugcaccauugcacuccagccugggugacaaagugagacuccaucuc

SEQ ID NO: 393752 - RNA, 70 nt, Homo sapiens
uucccaagacuucuuucacaauguuucuagggaaugggagucugaaacacacagagaagggagaagggag

SEQ ID NO: 393753 - RNA, 86 nt, Homo sapiens
ggaguuucccucuuguugccuaggcuggauugcagugacaugaucucggcucacugcaacuccgccucccagguucaagcaauucc

SEQ ID NO: 393754 - RNA, 68 nt, Homo sapiens
uaugauguaggccauggguuucucauaaacggucuuuauuauguugaggaacuuuccuucuauacaua

SEQ ID NO: 393755 - RNA, 91 nt, Homo sapiens
aucaaagagaccuaggcuuaaaguauaguuccucugguuacuaaguauggaauaaucagaaguagacuguauaguguuuuccagguuugau

SEQ ID NO: 393756 - RNA, 56 nt, Homo sapiens
uugaaagucauggcacaggcaaacggggucagcccuugucugucucguacauucaa

SEQ ID NO: 393757 - RNA, 62 nt, Homo sapiens
cucugccauaugguuucuuagcaccucacucaauucuuggcagccuaagacacuuggcagag

SEQ ID NO: 393758 - RNA, 57 nt, Homo sapiens
ucacagacauugaggggaccuuagagacccaucuaacaaaaccccuuugucauguga

SEQ ID NO: 393759 - RNA, 68 nt, Homo sapiens
gucauauucaagcugggcaaauaaggggcucuggauacuaaaggaccuuuuauuuagccagcuuuggc

SEQ ID NO: 393760 - RNA, 97 nt, Homo sapiens
cagggucacaaugcuagggcgcaagaccguccuucacuuaugggccugaaucauaggugcaauggugguuuugugguccuucagcuaaggacacuug

SEQ ID NO: 393761 - RNA, 78 nt, Homo sapiens
gaagcaaguggccuugagguugacggaauauucugaaacauuacgagaacugaucaauguuaaggcuuauaaugccuc

SEQ ID NO: 393762 - RNA, 70 nt, Homo sapiens
aagucuuugcuauugugaauagugccgcaauaaacauaugugugcaugcaucuuuauaguagcaugauuu

SEQ ID NO: 393763 - RNA, 75 nt, Homo sapiens
ggguguacaccuugugauacuauuuguaauguucuagaaagauauuccuuuuaauaucacaguggguguacaccc

SEQ ID NO: 393764 - RNA, 84 nt, Homo sapiens
aaguuaaugggugcagcacaccaacauggcacauguacauauacguaacaaaccugcacguugugcacauguacccuagaacuu

SEQ ID NO: 393765 - RNA, 75 nt, Homo sapiens
gcaaaccaaaaaccugacuuuuauucacuauuagacaaaagucuuauacaugugcaggucagguuaccuguuugu

SEQ ID NO: 393766 - RNA, 74 nt, Homo sapiens
cacuugauuccgaaaugaggcuuuugcagacguaauugaggaugucaagaugagaucauucuggaauuagagug

SEQ ID NO: 393767 - RNA, 77 nt, Homo sapiens
auuuuuuaaacauuguacauucuguagcugugucugcuucaaaauuauagcugcacgugguaaauguaaaggaaaau

SEQ ID NO: 393768 - RNA, 62 nt, Homo sapiens
gggaagugggagggagacaucaagaauuauggcuuuaguucaucuucucccaucccuuucuc

SEQ ID NO: 393769 - RNA, 55 nt, Homo sapiens
uggcuccuguggcuauuucaguugcuauuaaacaggaaaugggacuacaaagcca

SEQ ID NO: 393770 - RNA, 82 nt, Homo sapiens
auggucuuccaaaaauaauuauaaguuaagaaaauaacuuucaaaguaguaguuuuguguauaauaauggcuaggaagccau

SEQ ID NO: 393771 - RNA, 75 nt, Homo sapiens
ucacuugaaccuuggaggcagagauugcagugagccgagaucgugccauugcacucugcauuccagucuagguga

SEQ ID NO: 393772 - RNA, 64 nt, Homo sapiens
uccaaaugucuagagugauacugaagcuuugucagagaggucagcagugugauucuaacaugga

SEQ ID NO: 393773 - RNA, 70 nt, Homo sapiens
gucucugaauaaaagauuucauacaccaauaccagauauauacauugauggaauuuacuuauuuaggggc

SEQ ID NO: 393774 - RNA, 83 nt, Homo sapiens
ccugauucauccuugaagccaaccugccugaucagaauauccaugcuucugacuugaguaacuggcucagggaugugcacagg

SEQ ID NO: 393775 - RNA, 92 nt, Homo sapiens
cuaacaggugugaggugagaucucauuaugguuuuaauuugcauuucccugaugauuaguaauaaugagcauuuuuuucauauaucuguuag

SEQ ID NO: 393776 - RNA, 64 nt, Homo sapiens
cacucugcacuuugauuuggagcauguggaugugcgagugucaagaaaucaaggugugagagug

SEQ ID NO: 393777 - RNA, 76 nt, Homo sapiens
gguggcaagaacgaaauguaggguaauagaugaaagaaaagaucuuuaaaauaucuugguuucuuucuugucaacc

SEQ ID NO: 393778 - RNA, 69 nt, Homo sapiens
aagcuguguguaagcucucacacuccuuugcaauguuauuucucagggguguguuguaucuaucaguuu

SEQ ID NO: 393779 - RNA, 76 nt, Homo sapiens
uaugcuaucauuggcaauguacauaucuugcccuaccagauugggcagccuuauguucauuagcuaucauaucaua

SEQ ID NO: 393780 - RNA, 55 nt, Homo sapiens
accacccauucucugaccguggggucuguggcccacacugucuucaauggguggu

SEQ ID NO: 393781 - RNA, 100 nt, Homo sapiens
ggauuagaugaguuaaugcauguaaugggcugauagugccuggcucauagcaagcacauaaccaaugucagcuauuaguauuauuaaaaaauuuugaucu

SEQ ID NO: 393782 - RNA, 128 nt, Homo sapiens
aauaaucaccuggaaaccuuguuuaaaaguguagauucucugggcccuacucuuagauaauuugauuuaguugaucuggagagaggcccgugaacuuacguuuuuaauaagaaacccagaugauuauu

SEQ ID NO: 393783 - RNA, 58 nt, Homo sapiens
gugugcucaagauuaauucauguuguaauuuuuuuugacugagagaucuggggcacau

SEQ ID NO: 393784 - RNA, 63 nt, Homo sapiens
uugauuuuacagucucauagguggaagaaacuugccuuuucucagaugagacuuuaaacuugg

SEQ ID NO: 393785 - RNA, 105 nt, Homo sapiens
auccauuuauauaaaaaauguuuucgcaccucucuuggauguggaugggugcccagggguaacacuuucuagacaagggaauaaguguggacacagacauuggau

SEQ ID NO: 393786 - RNA, 57 nt, Homo sapiens
guuggaacacaaaagagauccuucaaggauuuuacagucuuuugugugagucccaac

SEQ ID NO: 393787 - RNA, 82 nt, Homo sapiens
gaauaacuaggcaaaugcaagaguagaacucaauuugaacuuaaaucaucuugguuuuagguuuuuguuugcucauuuguuu

SEQ ID NO: 393788 - RNA, 63 nt, Homo sapiens
ucuggccacagucuuuggcaucaaaagagaacuagggcagaagucaaagacauggcugucaga

SEQ ID NO: 393789 - RNA, 75 nt, Homo sapiens
cagguuaaaaugugcuuugaaaagagcugaaauaauuuuaguuuuacuuuauuuggagacauuagcaaauaccug

SEQ ID NO: 393790 - RNA, 66 nt, Homo sapiens
gcuuuucaucagcgugagaugccuuuggucuccaaucaauuguauaucucacuugaauguaaaagc

SEQ ID NO: 393791 - RNA, 56 nt, Homo sapiens
gaaguggaauugguaagcccaagaauauagucauugguugcaccaguuuacacuuc

SEQ ID NO: 393792 - RNA, 56 nt, Homo sapiens
gaauaaggucuaugucucaggcagagcuucucaccuggagaagauggaucauguuc

SEQ ID NO: 393793 - RNA, 70 nt, Homo sapiens
uuagauuggugcaaaaguaauugugguuuuggcugaaaaguaaaugcacaaagauuuugcacuaaucuaa

SEQ ID NO: 393794 - RNA, 56 nt, Homo sapiens
ucagguagcauuuuggaaacagcggccucuuuugcauggcuccaaauucugcuuga

SEQ ID NO: 393795 - RNA, 58 nt, Homo sapiens
aucugguguuuccuucacauugucccucuaccuggagugaguguggggaacacaggau

SEQ ID NO: 393796 - RNA, 58 nt, Homo sapiens
uugcccuuugcauggccugcugugggauucccucgcagcacgagcaugcaaggugcag

SEQ ID NO: 393797 - RNA, 88 nt, Homo sapiens
ggagaaucgcuugaacccaggaggcgcagguugcagugagccgagaucaugccauugcacuccagccugggugacagagugagacucc

SEQ ID NO: 393798 - RNA, 58 nt, Homo sapiens
uaaggcucuuguuauuuugagguauguuccaucaauaccuaguuuauugagaguuuug

SEQ ID NO: 393799 - RNA, 119 nt, Homo sapiens
uuaacauaguuauuuugaugaauuuuuuaagaagugauuuuccucauucuguacuuucuuccaaagagugaaaaagaaaucgauuuugcugaguuuuuggaauaaaucaaauauguuag

SEQ ID NO: 393800 - RNA, 84 nt, Homo sapiens
acagucucacagucuugcaauauugagaucucauggucucuuagucuuaaagacucucaguauugaaguuugaugacgcucugu

SEQ ID NO: 393801 - RNA, 74 nt, Homo sapiens
accacagaaugaacacuggauaaggagucagaagaacugacgucuccugauuuucuucacuguuugaucuuggu

SEQ ID NO: 393802 - RNA, 73 nt, Homo sapiens
uaaguuaauguuuaagacuccuauuacuaauaauaauugaaacaguaauaggaguaguaguagcauuaauuua

SEQ ID NO: 393803 - RNA, 66 nt, Homo sapiens
auagguaguugaggagauuucaaagcaaaaugugaugguguggccugaauacuccuaacugcuuau

SEQ ID NO: 393804 - RNA, 63 nt, Homo sapiens
uuugacuuuuauucacucugcuacauuauugggacagugcuaagggagagagagaaaguuaga

SEQ ID NO: 393805 - RNA, 102 nt, Homo sapiens
uuauacuuuaaguuuuaggguacaugugcacaacgugcagguuaguuacauauguauacuugugccauguuggugugcugcacccauuaacuugucguuuaa

SEQ ID NO: 393806 - RNA, 66 nt, Homo sapiens
gaaugcaggaaugcacaugccuucgauacacaaaccaaaaaugauacaaugugcaauuuuguauuu

SEQ ID NO: 393807 - RNA, 63 nt, Homo sapiens
aggugguuuuucaacacacacugcccacccucuuguagaucccagugucuguugaucccaucu

SEQ ID NO: 393808 - RNA, 67 nt, Homo sapiens
gaucauaaauguuuuauauaaguagcaggcacauuggagucauauugcauaugcagcauuuaugauu

SEQ ID NO: 393809 - RNA, 82 nt, Homo sapiens
aguuauaggguacaugugcacaaugugcagguuuguuacauauguauacaugcgccauguuggugugcugcacccauuaacu

SEQ ID NO: 393810 - RNA, 92 nt, Homo sapiens
uuuucugcacugaugucuacaguugugaaaaugcaccuguguacucauguagcagcauauuuuuauaauguauauuuuuagcagugagagaa

SEQ ID NO: 393811 - RNA, 72 nt, Homo sapiens
aggaaugcuuuuacacuguuggugggaguguaaauuaguucaaccacuguggaagacaguguggcaauuccu

SEQ ID NO: 393812 - RNA, 69 nt, Homo sapiens
aaggaguggcaaaugaagauggagaggcuaggugggcaccggggcaaaguagccuuauuugcauuucuu

SEQ ID NO: 393813 - RNA, 125 nt, Homo sapiens
guuugaauguacauuuuuaaaguucuucaauucaugagugguuuuuuucugccuuauagccaguccccacuauauuucagcuagauuuagcaaaagaucagucauugaaagaauacauuucagau

SEQ ID NO: 393814 - RNA, 64 nt, Homo sapiens
ggagauuauugaaucaugagggugguuucccccuauacuguucucaugguaguaaauaaguuuc

SEQ ID NO: 393815 - RNA, 77 nt, Homo sapiens
gcccccauguagcaaaacugucccagguccauauuauacaaacugugcugggcagugggacagcuuugugugguggu

SEQ ID NO: 393816 - RNA, 86 nt, Homo sapiens
acucagcagucaggggagauggcaaugcgauggugacugagugucuuagucuuuuuuguauugcuaugcaauaucugaggcugggu

SEQ ID NO: 393817 - RNA, 85 nt, Homo sapiens
gcuaugcaauguuucuagcuuuuuaugacaaucuuggccaaagcaggcuagauggcaauaagaaagacuagaauuguugcauggc

SEQ ID NO: 393818 - RNA, 62 nt, Homo sapiens
gacuuugucuugcauccuacauacaagcucaaccacaguagaauagggcacgaggcagaguc

SEQ ID NO: 393819 - RNA, 74 nt, Homo sapiens
ucuuuccccacagugguuuucaacuccaccugcauguuggaaucaucuagggagcuugaaaccaaggggaaggg

SEQ ID NO: 393820 - RNA, 128 nt, Homo sapiens
ggcugaugaugaaaucagaaaaguaauggacauaaaaaugaaaguaugcaguguguguguguguauguacguauguauaucacaugcacucauuuucaugauguacauauggaauuucacaaccagcc

SEQ ID NO: 393821 - RNA, 82 nt, Homo sapiens
uuuguuuauugugauuaucuuucauauaacaaugugcuuaaauagcuggugguucuugauaggucacucaacagugagcaaa

SEQ ID NO: 393822 - RNA, 94 nt, Homo sapiens
agagagucgcuugaacccgggaggcugagaggucgcagugggccaagauugcaucacugcgcuucagccugggugacagagcaagacuucaucu

SEQ ID NO: 393823 - RNA, 116 nt, Homo sapiens
guauuuuuuuaaaaaguuuuauaguuuuacguguuacauuaugaguccaaaauccauuuuugaguuaauuuuuguaucaugugugacagggugugauuaauuuuuugucuauguau

SEQ ID NO: 393824 - RNA, 68 nt, Homo sapiens
guugaaucaugaaauugccauuuuugaggguuaaaacagucggguuuugucaguuuccagaguucaac

SEQ ID NO: 393825 - RNA, 56 nt, Homo sapiens
guugguucuguuuauaugcuggauuacguuuauugauuugcauauguugaaccagc

SEQ ID NO: 393826 - RNA, 69 nt, Homo sapiens
acuuuuuguggaagauaguguguuaaugugacaaaaauuacaaauguacuuuucuuuccauccaaaagu

SEQ ID NO: 393827 - RNA, 77 nt, Homo sapiens
aacgaauuagcaaguguuuaagcacuuuuaucauaggagaggagcucaauaauguuuguuuugcuuguuaauuuguu

SEQ ID NO: 393828 - RNA, 64 nt, Homo sapiens
auugugaauagugcugcaauaaacauacguguguaugugucuuuaaagcagcauaauuuauaau

SEQ ID NO: 393829 - RNA, 97 nt, Homo sapiens
ggguauucacacugauauucuuggguaagucauuaaaauuagucaacuauuucugugucuucacccacaaaaggagacgugugagaagugaauacuu

SEQ ID NO: 393830 - RNA, 87 nt, Homo sapiens
ggagaaucacuugaacccgggagguggagguugcagugaguagagaucgcaccacugcacuccagccugccgacagagcaagacucc

SEQ ID NO: 393831 - RNA, 55 nt, Homo sapiens
aggaagacagagaauaaauguuaaguagaaaacuugcaguguucacuguauuccu

SEQ ID NO: 393832 - RNA, 129 nt, Homo sapiens
gguuacagguuuuacuauuuauugcuuauagaagcagcccaaaugcuucuauggacugucuuuuccccugcagacacucccacagaagcauuuggggcacuggcuuaacagcaagguuacagguuaacu

SEQ ID NO: 393833 - RNA, 59 nt, Homo sapiens
uuuuugaggggauccaaguguucuaaaauugauuguagugacauagagacucucaaaaa

SEQ ID NO: 393834 - RNA, 60 nt, Homo sapiens
ucugcucuuagcuuugcccaagauugucugaaugaucuugggcaaaucacugagggcaga

SEQ ID NO: 393835 - RNA, 88 nt, Homo sapiens
uugaaaaguguacugcuaugagaaugagauuaugguuacauguaacuacaugggcauuucauuuuuaaagccucuuugaacuuuuuga

SEQ ID NO: 393836 - RNA, 80 nt, Homo sapiens
auugcaaguguccuuccaugagugagugaauugcuaaacaaacgguaaugcacucgaaucauggaauauuauucagcaau

SEQ ID NO: 393837 - RNA, 55 nt, Homo sapiens
uuguuuacuacuacaugcccagcaucuggcauagugccuggcauguaauaagcaa

SEQ ID NO: 393838 - RNA, 55 nt, Homo sapiens
uuucuacuccucauggcagguuguuuuuaaaagauuacauucagaggaguggaag

SEQ ID NO: 393839 - RNA, 83 nt, Homo sapiens
acuacauuuaucagacugaugcagcuaggauuugugacaugauuuagauuucaucgaugagcugcauuuucaugaaauguagu

SEQ ID NO: 393840 - RNA, 90 nt, Homo sapiens
gaaaucaguauuucuaaguaugguaccacgucuuugaagugacauuuccuggagaugugccugcucugcucuuggaauacuuaagauuuc

SEQ ID NO: 393841 - RNA, 126 nt, Homo sapiens
gugugugucuaauuaaugaggguagagguuaaaaaauauuuguugaauaaauuaguauuaacauuuuuauugcuaauaugcuucaggcaaaacuauaggcccugaugauacaauaacaaaauacac

SEQ ID NO: 393842 - RNA, 59 nt, Homo sapiens
guuuaggaaugagaauauuuaguuguuucuauuagcuagagcaaccugauucacuagac

SEQ ID NO: 393843 - RNA, 129 nt, Homo sapiens
aucaaagggucaaauuauugauuuuguauucaaaauggacuuaaaaagucuuaggaggaaaaaauauccugaaauaaggcauuuuuuugaguugcaagagacagguacuugguaauuuuucuuuuugau

SEQ ID NO: 393844 - RNA, 84 nt, Homo sapiens
cuugugggcauuuagugcuauaaauuucccucuacacacugcuuugaaugugucacagagauuuugguauguugcaaacacaag

SEQ ID NO: 393845 - RNA, 60 nt, Homo sapiens
augugaggcuuucuagugauauuuggucccaagacuuuuaucacugucaggcccucauau

SEQ ID NO: 393846 - RNA, 60 nt, Homo sapiens
gcuggcaaguggccuacuuugucuugccuuugcccauuacaaagggagguuacuuuuagc

SEQ ID NO: 393847 - RNA, 66 nt, Homo sapiens
cucugccagucauauuacccaauacuuuaacauccacuagauauugcagaaugugaguuggcagag

SEQ ID NO: 393848 - RNA, 75 nt, Homo sapiens
guggugucuaauuugagauauuucuagcuuucugaugugggcauuuggcacuguaaauuucucuuuuaacaccgc

SEQ ID NO: 393849 - RNA, 57 nt, Homo sapiens
guaagaacaagccccaaacucuggccucucccacagacuugguugguuauuucuuac

SEQ ID NO: 393850 - RNA, 97 nt, Homo sapiens
cuggcccuuccugccauacccagcugcagucaucuucuagaaagcuucccccugcugcuucuggaaaucagcagagggugggcaagggggaagucag

SEQ ID NO: 393851 - RNA, 76 nt, Homo sapiens
agaauucagcaguauuucuccuacucacacauccgucuauaggcuuucugugagaagaaaaauauggcuguauucu

SEQ ID NO: 393852 - RNA, 84 nt, Homo sapiens
cuggggagguugacugacgaccgcucuaccugcuuccugcugaaauggggcaugguagggguugugcaguugagauuuccucag

SEQ ID NO: 393853 - RNA, 89 nt, Homo sapiens
ccucugcugagaugauguucaggcucaugguggcuucaggauuaucauaagcacccuuugucuggacauguccugaaacucagcagagg

SEQ ID NO: 393854 - RNA, 112 nt, Homo sapiens
gaagugguacaguuucauggccaguaugcuuauaaacauuugucagagaaauugagcacaccucaggaaauguuuaguggguugaaugcccagggaagcuguuaaacauuuu

SEQ ID NO: 393855 - RNA, 55 nt, Homo sapiens
uaaggaaggcugugugcuuuuaaaguuuguugaaacuuacacuuugcuuuucuua

SEQ ID NO: 393856 - RNA, 94 nt, Homo sapiens
gagaugugaauauagacagggguagagaauuaugaccauuuuggaaaucuacaguacugcauuugguuuuugugccucuuuuauaauuaauuuc

SEQ ID NO: 393857 - RNA, 102 nt, Homo sapiens
ccaauuguaggaagcagcacuaugugugacuaauaccuaugaucaagauauaaaguggaaaauauggguauuuuauacauaaccugccacuagcagccuugg

SEQ ID NO: 393858 - RNA, 66 nt, Homo sapiens
aagcaauugguuuuaguaaaaugagacuucuucaggagucacuccuuuacuguggacccauugcuu

SEQ ID NO: 393859 - RNA, 55 nt, Homo sapiens
cuggggccccgggugguuauggauuacccagagccauagcaccagacagcccuag

SEQ ID NO: 393860 - RNA, 75 nt, Homo sapiens
cagccacugugaaagauuuuaacugggagacuccuauacccggaagucuuucaguucugaaucucggcaggucug

SEQ ID NO: 393861 - RNA, 128 nt, Homo sapiens
caucucuauaauaaaaaggaaaaagaggaauccccuuuguagguuucauaguuuauacugauauuucugaugucgucucagagaauuagucacaauuauaggaacucagaaggcauuccguggagaug

SEQ ID NO: 393862 - RNA, 75 nt, Homo sapiens
ggaagcagagcagauggucuucauaaguuuuaagcaaaggugcuaagaaaacacaaaguuuacuuuucuacuucc

SEQ ID NO: 393863 - RNA, 65 nt, Homo sapiens
ggauacugcaggagggugcuggucuuaaucaucugagaaugagaucuuaccuuccugccuuaccc

SEQ ID NO: 393864 - RNA, 56 nt, Homo sapiens
gugugacagcuauagacaugauauauuuuaaaguuucaucuguaguauugucauau

SEQ ID NO: 393865 - RNA, 79 nt, Homo sapiens
acguaaaaacagcagccuagaaucuggcacuuaguuguucgucacugaaauguguuaucugggccugcuaacuugacgu

SEQ ID NO: 393866 - RNA, 121 nt, Homo sapiens
ccuagaccuaaagggaacuuugaaagaaaggagacugaguucauuuacaaaggguuaaaagagugauauuuaagcugugucugaagauuuuuuuuaaagauucuacaagaucuuggcuagg

SEQ ID NO: 393867 - RNA, 61 nt, Homo sapiens
aaguuguguauaaauuagcauauauaaaaauguccuuauuugugcuaauuuaugggcucuu

SEQ ID NO: 393868 - RNA, 77 nt, Homo sapiens
cugguaauucaggggguuaggguugcugaugcagucagggaggccugacugugcaugcccagccccuucaucaccag

SEQ ID NO: 393869 - RNA, 86 nt, Homo sapiens
ucagcugaaggcagauguuaggaauaguuuguuguuaaucccacccuuuggcaacaaagacauuucaacauccaguaucaggcuga

SEQ ID NO: 393870 - RNA, 101 nt, Homo sapiens
ugaggcaggagaaucgcuugaaccagggaggcggagguugcagugagcugagaucaugccauugcacuccagccuaggugacagcgcgagacucucucuca

SEQ ID NO: 393871 - RNA, 62 nt, Homo sapiens
uaucuccacucucuuuugccucucucucucucucagauagguagguagauagaugauagaua

SEQ ID NO: 393872 - RNA, 61 nt, Homo sapiens
ugacugucauaugugaauauccagccagaguugaaauggcuagauauucacauauggcuca

SEQ ID NO: 393873 - RNA, 61 nt, Homo sapiens
uuucccuuacuuaaacuuacucucauuauuuguggagaguaaguuuagaugaaaggaggaa

SEQ ID NO: 393874 - RNA, 78 nt, Homo sapiens
ucugaaauucaaaguagaaaaggggcaauuccaacccucucuuggguuccaaaguuccccuuuccuaucuuaguuaga

SEQ ID NO: 393875 - RNA, 88 nt, Homo sapiens
guaguguccauucucucggccuggccguuaugcucucccugccagggucuggucauggaggaugaauggccaagggcguugacacugc

SEQ ID NO: 393876 - RNA, 103 nt, Homo sapiens
caggcauguuguuucuuaaacaguuaaauggcauuugccagggcaaagagucccaguucauuguccuuucaaaugcauucgagguuuauucugcauggcacug

SEQ ID NO: 393877 - RNA, 55 nt, Homo sapiens
caggaggcagaguuugcaaugagccaagaucaugccacugcacuccaaccuccug

SEQ ID NO: 393878 - RNA, 83 nt, Homo sapiens
aacucacuugguuucagcuaguggcaaaaagaaggguguauuggaucuggaauucuuagguuaaggcugagagaaugugaguu

SEQ ID NO: 393879 - RNA, 60 nt, Homo sapiens
auauagccauagugcuuaaauucuuuuuggauuuuccuuggauagaaaacuuggcuguau

SEQ ID NO: 393880 - RNA, 71 nt, Homo sapiens
ccggguaccucaguuggaaaugcagaaaucacccaucuucugcguugcucacgcugggagcuguagacugg

SEQ ID NO: 393881 - RNA, 83 nt, Homo sapiens
ugcaauaguuuacugagaaugaugauuuccaauuucauccaugucccuacaaaggacaugaacucaucauuuuuauggcugca

SEQ ID NO: 393882 - RNA, 61 nt, Homo sapiens
uuauuagcagcaugagaauggacuaauauaguaaauugguagagugaggugcugcuguuaa

SEQ ID NO: 393883 - RNA, 61 nt, Homo sapiens
gugauacuaaauguguaaucauagaauacagauaauuuaaagugaauacauuugguuucau

SEQ ID NO: 393884 - RNA, 62 nt, Homo sapiens
ucuacuggcagacaaauuugagcauauuuucaucaaaugugaucucauaugucugggguaga

SEQ ID NO: 393885 - RNA, 63 nt, Homo sapiens
cuguaccgcagugacauuccuugauacuugucauggugauccagugagugcagcuguugucag

SEQ ID NO: 393886 - RNA, 55 nt, Homo sapiens
gugguagacaugaugggcacugcagucugacucuagagcucaucuucuuuaccac

SEQ ID NO: 393887 - RNA, 66 nt, Homo sapiens
gcuaucuguagucucaugguuccugcggugacuucacccacuccagugccauggcugcuagauggc

SEQ ID NO: 393888 - RNA, 55 nt, Homo sapiens
ugccaucauaaaaauaugugcuuauuauauguuagguacauaguauuuaguggca

SEQ ID NO: 393889 - RNA, 58 nt, Homo sapiens
uccuucauuugucaacucuaguuucucccuuaaacauggagauagguaaauagaggga

SEQ ID NO: 393890 - RNA, 59 nt, Homo sapiens
cugguuaugcuagcagugaaguugucacagggacagacucaggaccucuaguuagccag

SEQ ID NO: 393891 - RNA, 70 nt, Homo sapiens
uggaugauuggcaagagaacaacaucucuccuuugguagaacggacaguaaucucuuuugccuauuucua

SEQ ID NO: 393892 - RNA, 55 nt, Homo sapiens
ucacugggagcauuugagccuuuaaauuacuuacaggauucaaagcccacaguga

SEQ ID NO: 393893 - RNA, 89 nt, Homo sapiens
uauacguguguaucacauguguguaaauauauacacacguguauacacacauguguguaaauauauacacacguguuuacacacgugua

SEQ ID NO: 393894 - RNA, 55 nt, Homo sapiens
uaucaugggggguguacacuccaauaucauuggggguguaccucccccugugaua

SEQ ID NO: 393895 - RNA, 125 nt, Homo sapiens
aaaaagucuaaacuaugugaaggaagugguuuuacaaagagaaagaucaauugccuacacaauucaaauuuucuagugaauuuuuuaauuugugguuuacuuuauucauuuuggaguuacuuuuu

SEQ ID NO: 393896 - RNA, 79 nt, Homo sapiens
uggcaauuaugugggaggacuuggcuguugacccagcaggguccacacugcguuuguccuuccagucucaaaauggcca

SEQ ID NO: 393897 - RNA, 71 nt, Homo sapiens
guagcccuguaguauaguuugaaguuggguagaaagaugucuccagcuuuguuauuuuugcucaggacugc

SEQ ID NO: 393898 - RNA, 66 nt, Homo sapiens
guuagcaguggauggguggagaauucaaggguuucugcuuguguuuuuaccacccuccauucuggc

SEQ ID NO: 393899 - RNA, 80 nt, Homo sapiens
gacuccuguaucacagaaagguuugguuaaauaaauuuguuacguuuuucucuugcuaaucugucuuuguuauagggguc

SEQ ID NO: 393900 - RNA, 86 nt, Homo sapiens
ucuagagcaagaaugagaaggauuaauuaauauugaauagcauaaaaaaauuaaaucuuaguuugacuugacucauuuugccuggg

SEQ ID NO: 393901 - RNA, 100 nt, Homo sapiens
gcuuaaaucacugaagaucuuggaggaaagcaauuacaaauaagcugguaguucugcuucuccauaauugcucuccuccaaggucuucagugauuuaagc

SEQ ID NO: 393902 - RNA, 75 nt, Homo sapiens
agcucugcaaaucaagcuugacuccuuaaaggggagcauacccuuccagucaaagccuugguaaagcaaccaguu

SEQ ID NO: 393903 - RNA, 85 nt, Homo sapiens
guucuuuucaugaugaaacuguuauguaucuugauugggugguggugauccuaugacucuaugcauguuucacaauucaaagaac

SEQ ID NO: 393904 - RNA, 61 nt, Homo sapiens
gggagguagauuguauuaugacaaauaauauuuaggguuguuauagcaauuuuuuucuccu

SEQ ID NO: 393905 - RNA, 57 nt, Homo sapiens
guggcgaagauggauugagucauagauuugacuggaaauuggauccacuucugccac

SEQ ID NO: 393906 - RNA, 61 nt, Homo sapiens
caaggcuccucucgauaaugacuguuggcuucuccccuuccuagucaugugaggacccuug

SEQ ID NO: 393907 - RNA, 80 nt, Homo sapiens
aaauaugacacagugggauggaaaugggcuucaggaaccagaaggcuuggguucaaaucucauccugccugucacuauuu

SEQ ID NO: 393908 - RNA, 85 nt, Homo sapiens
gagucuugcucggucccuaggcuggaguucaguguccugaucuuggcucacugcgaccucugccuaccggguucaagcaauucuc

SEQ ID NO: 393909 - RNA, 68 nt, Homo sapiens
ugugaacugagcauuaacuacaggagaagcaccauccuugccauauguguuauaugucucauaucaca

SEQ ID NO: 393910 - RNA, 70 nt, Homo sapiens
cauuaggcuuguuuuacuaacugguaucuuuauauuggaguuugcuaguugauaaagcauugucauaaug

SEQ ID NO: 393911 - RNA, 70 nt, Homo sapiens
ucuuuauagcaguguaagaaucgaguaacacagaaaauugguacugaggagugagccauugcuauaaaga

SEQ ID NO: 393912 - RNA, 60 nt, Homo sapiens
uauagcaugggguuaaggacuugggugcuggaacuagguccacuuacuacuccuguuaug

SEQ ID NO: 393913 - RNA, 87 nt, Homo sapiens
aaauguuuauaguauucugugaugguaguuuguauuucuguggggucagcggugauaccccuuuaucauuuuuuauugugucuauuu

SEQ ID NO: 393914 - RNA, 57 nt, Homo sapiens
ugguuucucaaaucugugucacugaccaggacucuuaaugaccagggacagaaacca

SEQ ID NO: 393915 - RNA, 82 nt, Homo sapiens
ugugaucgcagcucacuggagccucgaacuccuggacucaagugauccuacucccucaggcuccccaguagcuggaacuaca

SEQ ID NO: 393916 - RNA, 70 nt, Homo sapiens
uuuuuaauggcuugugggaacuuuuaaacccugauauaaucuguguagcugucucacuagccaucaaaaa

SEQ ID NO: 393917 - RNA, 56 nt, Homo sapiens
ugcauggaaggcgcuuugugacuuaucgucaagaauaaguugcagaauuccaugua

SEQ ID NO: 393918 - RNA, 62 nt, Homo sapiens
uguguguauuugagauauugugaaauauauauuugguuuucaucaauacuucuuggcauaca

SEQ ID NO: 393919 - RNA, 72 nt, Homo sapiens
aaggaacacuuuuacacugcuggugggaauguaaacuaguacaaccacuauggaaaaguguaaagauuccuu

SEQ ID NO: 393920 - RNA, 66 nt, Homo sapiens
agggcuugcacuugaaauuccaguuuguagcuccacagugaaagcuauggguuucaagugggcccu

SEQ ID NO: 393921 - RNA, 111 nt, Homo sapiens
aucucaacuaaguacaucugugaagauccuguuuccaaaucaggucacauuuugagguucuagguggacaugaauuuuggaggcauacuauucaacucaguauguggagau

SEQ ID NO: 393922 - RNA, 59 nt, Homo sapiens
acagacugaaugugggugugugaggaaaaagaacacucaggcaagacuuuuagguuugu

SEQ ID NO: 393923 - RNA, 72 nt, Homo sapiens
uuuccauggcacaucuuuucugacuaggucauuuauaucugaaaauagcauuucuuaacaugugcuaggaaa

SEQ ID NO: 393924 - RNA, 86 nt, Homo sapiens
uuauacagaaucaugcauuaagagaacaugcacauaaggcaaaaugaugacugcauggccuuuaaaugucacagaguacugucuaa

SEQ ID NO: 393925 - RNA, 66 nt, Homo sapiens
aauuacagaucaguuauuuuguagacugucccucaauuuaggguugucugauaacugguugugauu

SEQ ID NO: 393926 - RNA, 87 nt, Homo sapiens
ggagaaucgcuugaacucggaggcggagguugcagugggccaagauugugccacuguacuccagccugggcaacagagugagacuuc

SEQ ID NO: 393927 - RNA, 89 nt, Homo sapiens
gccuauucuagacauucauguaaauggaaugacaaacuauguggcuuuuugugccuggcuucuuucacuuagcaugauguuuuuaaggc

SEQ ID NO: 393928 - RNA, 86 nt, Homo sapiens
auggguaaauugcaugucauguuuaguguacagauuauuuugucacccagguaauaagcauaauaucugacaggcaguuuuuccau

SEQ ID NO: 393929 - RNA, 83 nt, Homo sapiens
uaaaugguuauccauuugccaaugggaauuuuccuauaaguaauggauaugggauaguccauuggcaaauaaguacaaauuua

SEQ ID NO: 393930 - RNA, 64 nt, Homo sapiens
uguuugagauguagauauggauuagaccauuuggguuuagcacaucauguacaucuaguaaaua

SEQ ID NO: 393931 - RNA, 72 nt, Homo sapiens
gugcauggaaggagaggaaugaaugacuguugaagccagauggccuugcucauugauucucuccuuucccgc

SEQ ID NO: 393932 - RNA, 73 nt, Homo sapiens
gauugagagaaaaggcagcuguuauauacugaguauauauuauacucuuauucaucuguuuuuucuuaagauu

SEQ ID NO: 393933 - RNA, 87 nt, Homo sapiens
ugcagggcuuaaaaccuagaugacagguugauaggugcagcaaaccaccauggcacauguacaccuauguaaccugcacuuucugca

SEQ ID NO: 393934 - RNA, 63 nt, Homo sapiens
ggagucugugcauucuuaaaucaggaacuuaagucaguucuuguaacauaauguauguacucc

SEQ ID NO: 393935 - RNA, 89 nt, Homo sapiens
auaguuaauggcucagcuaugaaauggaccgucaugcaaugucuaagacauuugcaaagaccucuucacuuccauggagucauaauuau

SEQ ID NO: 393936 - RNA, 71 nt, Homo sapiens
ggagagaagagaaauuguucacauuccaugcuguuuuucuggcauggaaugugaauaacuuccuucacucu

SEQ ID NO: 393937 - RNA, 58 nt, Homo sapiens
acuuuguguuacccagcaaggacuaaccaagguuuccuucugaaaaaugcacacgagu

SEQ ID NO: 393938 - RNA, 58 nt, Homo sapiens
uugaguuugaguauucuaaagcugguucauaaaguugcuuuaguguaaucuuauucaa

SEQ ID NO: 393939 - RNA, 81 nt, Homo sapiens
auguuauugguaaggcuucuggucaacagcaggcuauuagcaguuaagccuacuauugaccagaagccuuaccaauaacau

SEQ ID NO: 393940 - RNA, 83 nt, Homo sapiens
aaagaagaguaagagagcaucaauggcaugugggaaucuaaccacuugauauucccaugucauugaaguucuuacucuuuuuu

SEQ ID NO: 393941 - RNA, 102 nt, Homo sapiens
ucucuccaggcauuguuguucuuguuuguuggggcuauuugucuauuuguuuaguaauuuuuccaaagugguuuuuacaaagacagaaugaucuggcaggga

SEQ ID NO: 393942 - RNA, 102 nt, Homo sapiens
cccuacacgucagagagaugugggauuuugccaggugccaaguaugucuaugccaguuguacauuuuggcacugggaaaaugaccacggaaugacucugggg

SEQ ID NO: 393943 - RNA, 57 nt, Homo sapiens
cagguuauugugggugcuggagggaaugacuuucacucugagucauucaguggccug

SEQ ID NO: 393944 - RNA, 121 nt, Homo sapiens
agccacugugaaaaugauugcuaaugguaucuggaucugguugaggagagaauguuacauaucacauccaggcuuuccugagaucagaauucaaauccaguuguccauuugggagguggcu

SEQ ID NO: 393945 - RNA, 75 nt, Homo sapiens
uagaccguaaaugauaugaucgcccuagcuugacuccacuggucauccuuuaagauuaauguuagcuacuguuua

SEQ ID NO: 393946 - RNA, 88 nt, Homo sapiens
ggagaaucgcuugaacccuggaggcggagguugcagugagccgagauggcaccauugcacuccagccugggggacaaagcaagacucc

SEQ ID NO: 393947 - RNA, 84 nt, Homo sapiens
ugcauccucaucuucuuuuaguggaauauuuacaguuucuucagcuggacuaucaaaucuuucacuagucaguuguuggaugca

SEQ ID NO: 393948 - RNA, 99 nt, Homo sapiens
aagauuaauauuuccauagugagacaugugaauauuuguacuagguagaauguggaauaaguuaaauaaccucauguccguuggaaaauuguugguuuu

SEQ ID NO: 393949 - RNA, 87 nt, Homo sapiens
guggaaggguagaagggcaagagacugcauauaugaaagagcucacuuuuauaacagagacuccugugcuaacaaacccauucccac

SEQ ID NO: 393950 - RNA, 68 nt, Homo sapiens
cucacauguacuaggcacugcacaaccccuuauaaaguugguauuguuauugcuuuugugcaggugag

SEQ ID NO: 393951 - RNA, 94 nt, Homo sapiens
gguaagugugguagauuuguuuuaauuguuuucauauguuggcucucucacauaguaugaaacucuaagauucacaucuguaaaugcacuuacc

SEQ ID NO: 393952 - RNA, 101 nt, Homo sapiens
ggaaaacuugauagagagaugaaaauaucaaaguaggcauauguuuuuaugaaaguuucagaaaaguauguuuauuuugacuuaugucuaaauuagauucc

SEQ ID NO: 393953 - RNA, 92 nt, Homo sapiens
guagagguugaggugauuugucugcaggaauaguggaacuagacagggaaaugauuuauuacucuaaugacaaaugaucaacaaacuucugc

SEQ ID NO: 393954 - RNA, 61 nt, Homo sapiens
caggacgcauacacguuaggcgaagucauccuuggugguguuucuauggugaugaguccug

SEQ ID NO: 393955 - RNA, 69 nt, Homo sapiens
ugaacagacugaccucugaccuugccuuccaugacaugguugcuggcuucuuagagaucaucugcuuca

SEQ ID NO: 393956 - RNA, 101 nt, Homo sapiens
gugguaaaauaugcauaacauggaguuugucauuuaaccauuuuuaaguauacaguucaauggcauuaaguacguuugcauuguugugcaaccaacaccac

SEQ ID NO: 393957 - RNA, 101 nt, Homo sapiens
ugguaaugguauaauuuuggauuauaaacugagauuuguuaguguuagcagacagaccaucaauucacauuuauugucaacagaguauaccaaauuuacca

SEQ ID NO: 393958 - RNA, 66 nt, Homo sapiens
augagauuuggguggagacacagagccaaaccauaucauucugccccuggucccccgcaaucucau

SEQ ID NO: 393959 - RNA, 65 nt, Homo sapiens
auuuagagggaagagcaguguguugagaagaauuagguucaacagaacugggcuugcuuuuggau

SEQ ID NO: 393960 - RNA, 130 nt, Homo sapiens
agcauauaaaacacugcauaauguguaggugugcucuacuacaacaaauugaagauucugucaagaagauucugucaaaucuuauguuguagcagagcacacuuguacauuaugcaguguuuuauaugcu

SEQ ID NO: 393961 - RNA, 119 nt, Homo sapiens
auuauaaugaugaugaucuauaccauuuauuaagugcguacuguaugccaggugcucuucuuggcccuucauauaacagcagcaguggcaguuaauauuuguggaaauuacauuauagu

SEQ ID NO: 393962 - RNA, 130 nt, Homo sapiens
aggugaaauaaacagccauguugcucacacaaagucuguuugguggucucuucacauggaugcgcaugaaauuuugugaagagaccaccaaacaggcuuuguuggagcaacauggcuguuuauuucaccu

SEQ ID NO: 393963 - RNA, 62 nt, Homo sapiens
uagggcauuuagaggcuauuaaguuaaacuaagcuuguuagaaugggcucugaugcaaucug

SEQ ID NO: 393964 - RNA, 78 nt, Homo sapiens
ccagcgauugauagaucauaugguagguauauuuuuaguuuuuugaggaaccuccauauuguuugcaaugguugcugg

SEQ ID NO: 393965 - RNA, 55 nt, Homo sapiens
gacgccuuccugucagcuauaagcacauaaaguauguggcuagaggccaggcguu

SEQ ID NO: 393966 - RNA, 59 nt, Homo sapiens
gaucuggucuuugauuagacacccugaccuuuuacgaguguugaucauugaucaugauc

SEQ ID NO: 393967 - RNA, 76 nt, Homo sapiens
ugacuuacuugaguagaaguaugucaguaucucuccgaacaaaguugaugccagaacucucugcucaugugaguca

SEQ ID NO: 393968 - RNA, 78 nt, Homo sapiens
acacuuuggaaauguguuugcauucagugagucuuuugcacuacauuggagaaacugcaaacauacuuucuguugugu

SEQ ID NO: 393969 - RNA, 61 nt, Homo sapiens
ucuccuuuguuuaguugaauuguauuguucucuucaaaacuaacuuggcuaaauaaagaga

SEQ ID NO: 393970 - RNA, 103 nt, Homo sapiens
agcauuuaaguaugccaugcacucuguagauucugaggauaaacacaguuguucacagcuauaucacaguaucuagcacagugccuggcacauaguaagugcu

SEQ ID NO: 393971 - RNA, 59 nt, Homo sapiens
aaugcuggauggccugaggaaagauucaacugccucucuuuuugggcuuucauaguguu

SEQ ID NO: 393972 - RNA, 77 nt, Homo sapiens
uugcucuguugccuaggcuggagugcaguggcaugaucucagcucacugcaaccuccaccucccagguucuaaguaa

SEQ ID NO: 393973 - RNA, 70 nt, Homo sapiens
gguuuguccagagaagucauuacuucauuguagauuuaacuguggggcgaugcuuuauuugguucaaacu

SEQ ID NO: 393974 - RNA, 86 nt, Homo sapiens
gagcuaaguccaaugggcagaacagggccuccauucccucaauaccaagagagauggaacugaagugcugcccuuucuggaagcuc

SEQ ID NO: 393975 - RNA, 57 nt, Homo sapiens
acugaaaaggucaaauguauuuugauaaguuaucaaggcacauuugacauuuucagu

SEQ ID NO: 393976 - RNA, 89 nt, Homo sapiens
cccccagucccgggucaugucuugaaauucaguuuucugcugaaagaagcugagacuacuuggacaaaugguugauaccggguuggggg

SEQ ID NO: 393977 - RNA, 75 nt, Homo sapiens
guuccucaguacuuuguuauaacccacagguuuccgaagucaaagccugugggauuagaaaguauaagaaugaac

SEQ ID NO: 393978 - RNA, 113 nt, Homo sapiens
gccgaaagccaaguucagaaagugucuuaccgggagggaguccuguccuccaccauauuugccaggacaucacucccuccuccucaagacacuuccugaaccgggcuuuuggc

SEQ ID NO: 393979 - RNA, 55 nt, Homo sapiens
uugucacauggggcggcugcccucugccagugagggcaaagggccagugugacag

SEQ ID NO: 393980 - RNA, 77 nt, Homo sapiens
ccucugucaaauugggguccgaaccagauggguuccaggcccgcuggugaucuagacccccaagaagucugcagagg

SEQ ID NO: 393981 - RNA, 67 nt, Homo sapiens
gaggcagguuuucaccugaagucaggaguucaagaccagcuugaccaauauggugaaacccugucuc

SEQ ID NO: 393982 - RNA, 102 nt, Homo sapiens
uugagacagagucucgcucugucacuaggcuggagugcaguggcgugaucucggcucacugcaaccuccgccuuccggguucaagcgauucuccugucucag

SEQ ID NO: 393983 - RNA, 109 nt, Homo sapiens
cuugggugguuucuaccuuuuggcaauuguuaauaguguuucugugaacauuuguguacaaguauuuguuggaauaccuguuuuuaauucuuuuggauauauaccuagg

SEQ ID NO: 393984 - RNA, 115 nt, Homo sapiens
guggcuggucuguaguggugaggggcuuuggauggugggacugaauccuaggaucuaaggugggugcucagugcuguaccaucuaaggaugcuguucugugcucagauaagccac

SEQ ID NO: 393985 - RNA, 105 nt, Homo sapiens
ggggaugguuggcggaccugcggagaaagauaaugguaauugauggaaucaaagucgcagcacagccuuguguuuucuuggcaauuaauucccccaccccucccc

SEQ ID NO: 393986 - RNA, 59 nt, Homo sapiens
guuuuugggaaggaggagaauuauauguauauagagcugauaucuuuauucccaagagc

SEQ ID NO: 393987 - RNA, 80 nt, Homo sapiens
gaggaacaggugccacugagguaggugaucagugcuuaaauccauaagcaucugcuucugaguucauugaucuguuucuu

SEQ ID NO: 393988 - RNA, 68 nt, Homo sapiens
auauuauugagagagaacauuuguuacaggggcaaacccuguuccaagguuucuuucacucaaaguau

SEQ ID NO: 393989 - RNA, 66 nt, Homo sapiens
ccuagcuggaguuuuuguuauaggauauuguguggcagagccugggacaugagcucgagaccuggg

SEQ ID NO: 393990 - RNA, 57 nt, Homo sapiens
agcuucauuccaacuuccuucuuagguuucagagcagaaggaaauuggaaugaagcu

SEQ ID NO: 393991 - RNA, 78 nt, Homo sapiens
ucuagaaaaaacugucuucugacaguuuccucugaaaaauuuaaagggagacaagcagaugagcaguugaauuuugga

SEQ ID NO: 393992 - RNA, 99 nt, Homo sapiens
guccuuauuuucauguuuuagagauugugucucauucugucaccccaauuggaguguagcagugugaucacagcuuacugcacccuugaauuucuggac

SEQ ID NO: 393993 - RNA, 56 nt, Homo sapiens
uucucaggguacagucagaauguagauuaugucucaauucaaguaugccuugagaa

SEQ ID NO: 393994 - RNA, 80 nt, Homo sapiens
gccuccucuaggcuuuuggacccugucucugcaucucuggcagggcgaagagacaguauaccgaaauggccaggccaggc

SEQ ID NO: 393995 - RNA, 129 nt, Homo sapiens
agccuccccagcccaucagucacgcugccaaggacacaggaaagaauaagaagucauagcuauugguucuuauggcuucuuauucuuucccguguccucggcagcguggcugaugggcugggggaggcu

SEQ ID NO: 393996 - RNA, 79 nt, Homo sapiens
ucuguauuucuuccccuagcauauccauauauucuagaacucuggauauguucuuuguguaaggugaacuuaguucaga

SEQ ID NO: 393997 - RNA, 64 nt, Homo sapiens
aacagugcaaugacccgucacugacagauuuugaaagaacugcugugauuggucacugguuguu

SEQ ID NO: 393998 - RNA, 61 nt, Homo sapiens
aauaccagaagaagcagaaugguucauuguucuggaccucaaggaugccuucuucuguauu

SEQ ID NO: 393999 - RNA, 63 nt, Homo sapiens
ucuuagauauguauauagauuuaagcuaaauauuuguguguauguuuauaugcauguguagga

SEQ ID NO: 394000 - RNA, 63 nt, Homo sapiens
gauggcagagucuugcaucuuuagaguaugaacuuuuaauucugaaggugaugagaugccauc

SEQ ID NO: 394001 - RNA, 69 nt, Homo sapiens
guauggguaguacaaaguguauacagagccauaaauauauuuacuguauauauauguauuaugucaggc

SEQ ID NO: 394002 - RNA, 80 nt, Homo sapiens
uauuacuuaacuucuaugggcuucaguauccucauuuguaaacuggauuaauugcaauuaguccauagaguuuugugaua

SEQ ID NO: 394003 - RNA, 66 nt, Homo sapiens
cauuuugccuguagacacuuacccucagagggguauuuugaggauaaaugagauacaggcaaagug

SEQ ID NO: 394004 - RNA, 71 nt, Homo sapiens
cuauauggugaugguuuucaccugcaugcuugguguaagugugcuaaagagaaccaccuuucauuaaauag

SEQ ID NO: 394005 - RNA, 57 nt, Homo sapiens
gcuggggaguggggugggucccugaagaccucucaaggacacugaacacuucccagc

SEQ ID NO: 394006 - RNA, 67 nt, Homo sapiens
auugugugaaccuucuagaaucagacauauuugcaaaagauugucauugcuuaaggguucaugcaau

SEQ ID NO: 394007 - RNA, 82 nt, Homo sapiens
guccuugcuauugugaauggugccgcaauaaacauacgagugcaugugucuuuauagcagcaugauuuauaaucguuugggc

SEQ ID NO: 394008 - RNA, 58 nt, Homo sapiens
uuagacuuuaaggauucuaaucuuuugggauuucaauauuuggaauuuuagaguuuga

SEQ ID NO: 394009 - RNA, 77 nt, Homo sapiens
ucuugaaagaugaugcaguacuuugggaacacagcaauaaaaaugugauaauuucccuauugcaucaccuuucuagg

SEQ ID NO: 394010 - RNA, 57 nt, Homo sapiens
gacagagaucaugcaacugcucgccuuaggaggcgaaagucaacagguacucgaguc

SEQ ID NO: 394011 - RNA, 112 nt, Homo sapiens
ucuguugguuucuggaaaauugccuuuauuauagcuaaauagauuccuucuacuuauuacuuauuaggaaugacuuugggacuguauuaaaugccuuuucagcaucuacaga

SEQ ID NO: 394012 - RNA, 64 nt, Homo sapiens
cucccuugcccuucugccaaucaacccacauccauccagcauuggaggcaggacagggcaggag

SEQ ID NO: 394013 - RNA, 58 nt, Homo sapiens
uacuuugcaguguuggugauauaacgaaauaacaugugugccacuguucuguaaagug

SEQ ID NO: 394014 - RNA, 62 nt, Homo sapiens
gagauccaucucacaugcaaugauacccauggguucaaaguaaagggauggagacaggucuc

SEQ ID NO: 394015 - RNA, 60 nt, Homo sapiens
cagggucaguuuuuuuaaccauccauauuuguacugugguuagguaugagagcgaccuug

SEQ ID NO: 394016 - RNA, 56 nt, Homo sapiens
uugcuauaaagacacgugcacacguauguuuauuguggcacuauucacaauagcaa

SEQ ID NO: 394017 - RNA, 68 nt, Homo sapiens
caagauucagcuucaaaaaauggucuuauguacaaagcagccaguaccauuccguuggagcuggcuug

SEQ ID NO: 394018 - RNA, 56 nt, Homo sapiens
gagccugggaugaggcaggaaggagccaagggccagagacugccuuauuccagcuc

SEQ ID NO: 394019 - RNA, 64 nt, Homo sapiens
ugagacauauuauacugcuuuuaucuuuacuuuugaaaggcaaugcagucauggaaugcucuca

SEQ ID NO: 394020 - RNA, 116 nt, Homo sapiens
cagccaagugcucagcacauaaagugcuuacuaaguugccaacuuaauagacuccuauggauucauuuauuuggcaacucaguaagcgcuaauauaugucauauguaucauuucug

SEQ ID NO: 394021 - RNA, 78 nt, Homo sapiens
gggaagagauuuggaaauggaugguggugacaguugcacaacagugcaaauguuaguaacaccacugaauugugucuc

SEQ ID NO: 394022 - RNA, 60 nt, Homo sapiens
guggguauucguuguagccauuuucuuuuccuagucaagguuuggacagugauuauccau

SEQ ID NO: 394023 - RNA, 61 nt, Homo sapiens
aguuuuaggguacgugugcacaaugugcagguuaguugcauauguauacaugugccaugcu

SEQ ID NO: 394024 - RNA, 77 nt, Homo sapiens
ggcuauuaugcagauauuuuugugguugcuuaacagugucacuggucuguguacuuaagaguguuuucauaguggcu

SEQ ID NO: 394025 - RNA, 72 nt, Homo sapiens
guuguaauucuguauuguuuagggacuagugacaagaaaaaauagucuguacauguucaguacagaagcaau

SEQ ID NO: 394026 - RNA, 92 nt, Homo sapiens
cugguuguuuugugugguauuauaacuagguauccaagcuuguucaaaaaucauaucccaaugccugcaguuaugguucaccagauaaucag

SEQ ID NO: 394027 - RNA, 115 nt, Homo sapiens
uguuuaacaaacuaccuuuguaaauaauuucuuuucucuaagaauugaauuuaauaauggaauaugaaaugcugucuaggggaaaugagaaugagagggaguuuuaauuugaaua

SEQ ID NO: 394028 - RNA, 55 nt, Homo sapiens
ggugccaggagagggcaggagggcuacagccuuucaccugcuguucuuuugcacc

SEQ ID NO: 394029 - RNA, 62 nt, Homo sapiens
caaacagaaguuuuaucuauauuaaugacaacauuuauuagguuaggcaaacuucuguuuug

SEQ ID NO: 394030 - RNA, 83 nt, Homo sapiens
ucgaaaaacugaaaauagagcuaccauagaauccaguagugggauugcuggauccuacgguagcucuauuuuuaguuuuuuga

SEQ ID NO: 394031 - RNA, 64 nt, Homo sapiens
uuucuacagggcuugccagguaacacuuuccucucacguucuacucaagggcucucuguggaaa

SEQ ID NO: 394032 - RNA, 102 nt, Homo sapiens
ugaggcaggagaaucacuugaacccagaaggcggagguugcagugagcagagauugcaccauugcacuccagccugggcaacaagagugaaacuccaucuca

SEQ ID NO: 394033 - RNA, 120 nt, Homo sapiens
cacauuuacugaagauguccuauguguaugcugugccugaugucauugucagaauuuucuuagucaucaccaucacucagugacaucguugccauguuaugcacaaggaaagugagugug

SEQ ID NO: 394034 - RNA, 58 nt, Homo sapiens
gcacccuauugguucuaacccuaacucauacagauuuugguacuaaaaaguagggugu

SEQ ID NO: 394035 - RNA, 69 nt, Homo sapiens
ggagaaugaguuguguggcuaucacuggaaggaaagaaaggguccaauguauagaucugauucaucucc

SEQ ID NO: 394036 - RNA, 63 nt, Homo sapiens
cauggauuuuuuugaauggcaguuauccaaguauggucuaggggcccuucgggggagucuaug

SEQ ID NO: 394037 - RNA, 57 nt, Homo sapiens
uaguccauaggaauuuuucagccccuauaauagggcugaauagucaacgauggacug

SEQ ID NO: 394038 - RNA, 68 nt, Homo sapiens
cccuaucuccaaauacaucacauucugagauacugagguuaagacuucaugugaauuauuuggugggg

SEQ ID NO: 394039 - RNA, 98 nt, Homo sapiens
uaagaaucuguuaauaaaggcuaucaguggaacuaggugaaugguaaguguauuuauauguuagacauggugggucuuuauuacugugcucuuucuug

SEQ ID NO: 394040 - RNA, 55 nt, Homo sapiens
auacagaggggugaaaguucacagguuauucugugaacagucaucucucuuguau

SEQ ID NO: 394041 - RNA, 96 nt, Homo sapiens
agacggagucucacucugucacuaggcuggagugcaguggcgugaucucggcucacugcaaccucugccucccggguucaagcgauucuccugucu

SEQ ID NO: 394042 - RNA, 60 nt, Homo sapiens
gugcacguguuugcaugugacuuaccccgaagcuugguaggcuuuuggagaacacugcac

SEQ ID NO: 394043 - RNA, 68 nt, Homo sapiens
uugcuugaggcugggaggcggagguugcagugagccaggaucgcaccauugcacuccagcccaggcaa

SEQ ID NO: 394044 - RNA, 62 nt, Homo sapiens
cagaaaagcacaagcuuucaacuuagcaccauugucaauaagccuaggucugugcucuucug

SEQ ID NO: 394045 - RNA, 75 nt, Homo sapiens
uaguguucugagaaccaggcugggcguuucaagguucaguauguucacuuggaauuaauccuccugguuucacua

SEQ ID NO: 394046 - RNA, 74 nt, Homo sapiens
aaugccacuuuauuucuucauguuggauuuguuucacuggaacacuguuuuguggagaauguagaugagguguu

SEQ ID NO: 394047 - RNA, 73 nt, Homo sapiens
auugacacugauuuuucuuuaaaaugugggacacaagcauuucucaagucuaaaaagagaagucauuguuagu

SEQ ID NO: 394048 - RNA, 55 nt, Homo sapiens
augugacagugguuuuaagcguccuggcaaugcggaucuuagcuacuggauacau

SEQ ID NO: 394049 - RNA, 81 nt, Homo sapiens
uaaaacauuaguuacagaauguacagagguuuaugguuuauuucccagauagcuuguguuuuucuaaguaucugauuuuua

SEQ ID NO: 394050 - RNA, 109 nt, Homo sapiens
ccagaacagauaguguuuaauuccacuuugucugugucuguuugagcugcuaucacaaaauaccauagacugaguggcuuaaaccaacauuuacuucucccacuucugg

SEQ ID NO: 394051 - RNA, 123 nt, Homo sapiens
uuucagucuugaggucucucccucuugcagguggcuauagacucuagcccuuacaagacuucaggugauuuggucauggauguuuauaguacaccuuucagggggugccuuuuuauacuggag

SEQ ID NO: 394052 - RNA, 129 nt, Homo sapiens
aacuccugaccucagguaauccacccgccucagccucugaaagugcugggauuggccgggccaguggcucaugccuguaaucccagcacuuugggaggcugaggugggcggaucacgaggucaggaguu

SEQ ID NO: 394053 - RNA, 81 nt, Homo sapiens
cagucccagugagaugaaucagguacuucaguuggaaaugcagaaaucacccaucuucuguguugaucacacugggagcug

SEQ ID NO: 394054 - RNA, 62 nt, Homo sapiens
ggguuagguucuagaggcacaaugaugaauaagguuacuugaucugucuuagagcuugaccc

SEQ ID NO: 394055 - RNA, 65 nt, Homo sapiens
ggggggcauuggcacagguguagaaaaugaagccugaggguccccugacuuguccgagguccccc

SEQ ID NO: 394056 - RNA, 67 nt, Homo sapiens
uucccacuaaugccaucagagaaaacucuuucugaauacuaaucagaaacucucaugaagugaggaa

SEQ ID NO: 394057 - RNA, 95 nt, Homo sapiens
ucuguuuaaugcaggguggcaaaguaagagaauggguuacuuuccucagcgggugggaaacauaagacaucucuuauugcccaaggcaaugcaga

SEQ ID NO: 394058 - RNA, 84 nt, Homo sapiens
uucuguaagaugaggaagaguuagcagggaaaaggggaggaaaggcuuggagcccugagaaaacuuuguccuuauguuggggaa

SEQ ID NO: 394059 - RNA, 89 nt, Homo sapiens
uuuguuuuugagaauuuggaauguaguaauuugguuagugaaaguucgagcagugagagaaaccuacauucacauaucucaaaaucaaa

SEQ ID NO: 394060 - RNA, 61 nt, Homo sapiens
ucaagagauauaugcugguuuaagauacacaaaaacuugaacaguacuugagaucuuuuga

SEQ ID NO: 394061 - RNA, 65 nt, Homo sapiens
auugcauguucuuacucauacaugggugcuaaaaaauguguucauguggauguagagaguggaau

SEQ ID NO: 394062 - RNA, 64 nt, Homo sapiens
caagaggcuguguauaaagccauaacugauaaaacggcucgggauguuguaauacagcuucuug

SEQ ID NO: 394063 - RNA, 75 nt, Homo sapiens
gauggucuuggacaagauugcagagaauucuccagauuuuuaggagagagauuuuuguucuucucccuuacuauc

SEQ ID NO: 394064 - RNA, 85 nt, Homo sapiens
gcuguggggcuaggacccauggcagugucuagggguguuucagcugaagccccagugggcauguguuacgggguccauaggcagc

SEQ ID NO: 394065 - RNA, 101 nt, Homo sapiens
ugagacacaagaaucguuugaacccgggaugcagagguugcagugaacugagaucaugcaacugcacuccagccugggugacagagugagacucugucuca

SEQ ID NO: 394066 - RNA, 103 nt, Homo sapiens
gauagaaaauguuuaagacgauggcuggcacaguuaagugcuaccuaaguguaagcacuugccacuugcugcugcuacuauuauuguuauugaaauuauuauu

SEQ ID NO: 394067 - RNA, 84 nt, Homo sapiens
ccugacuuuuuaaugauugccauucuaacuggugugagaugguaucucacugugguuuugaugugcauuucucugauggccagg

SEQ ID NO: 394068 - RNA, 96 nt, Homo sapiens
ccucucucucacucuaacacagagguuuauuucucaccacggcuuuaccugugccgggggagagccaccucucguguuaguggcauuugaaagagg

SEQ ID NO: 394069 - RNA, 81 nt, Homo sapiens
gauuuuugacaaaggugucaacacaguuaaauggggaaagaauaaucuuuuccacaaaugauguugaaacaacuagaaauc

SEQ ID NO: 394070 - RNA, 63 nt, Homo sapiens
cugcuaaggagcaguggacggguccuagcacgugcugugagccacccgcuguccagggagcgg

SEQ ID NO: 394071 - RNA, 59 nt, Homo sapiens
gcuuagcaagcugagagccacugucucuuuuacagagcauggcucuuugcugcuaaagu

SEQ ID NO: 394072 - RNA, 55 nt, Homo sapiens
ucaccuugugauccacccgccuuggccucccaaagugcugggauuacaagcguga

SEQ ID NO: 394073 - RNA, 85 nt, Homo sapiens
ggauccuuagagggcccuuuuggucuaucagagaagcaugacuugaugcuccugaauugaaccugagguacccacaugaggaucu

SEQ ID NO: 394074 - RNA, 59 nt, Homo sapiens
caguguuuuuacaagcacucugggugauucugauaaauccagaaauuugagaaccacug

SEQ ID NO: 394075 - RNA, 68 nt, Homo sapiens
guguguggguguguaucugugugugugugcaugcacaugcauaugcacgugcauacacacuugugugu

SEQ ID NO: 394076 - RNA, 67 nt, Homo sapiens
ggguacaugugcacaaccugcagguuuguuacauauguauacaugugccauguuggugugcgcaccc

SEQ ID NO: 394077 - RNA, 88 nt, Homo sapiens
gggcaugagauuugggaggggccaggggcagaauuauaugguuaggcuuuguguccccacccaaaucucauuuugaauuauaaucccc

SEQ ID NO: 394078 - RNA, 75 nt, Homo sapiens
guguuuuuggucauugguucuguuuauaugcuggauuacguuuauugauuugcauauguugaaccagccuugcau

SEQ ID NO: 394079 - RNA, 84 nt, Homo sapiens
ucaaggaaaugaguaguugcuaaauauugaguuaauauguuauacauuccuucucagugauuacagaauacuuauaucaaauga

SEQ ID NO: 394080 - RNA, 74 nt, Homo sapiens
gggaaaggagguauauuggacagauguaaauaguauuuauuauuuuauucuucucaauaauaucuccauuuccc

SEQ ID NO: 394081 - RNA, 64 nt, Homo sapiens
ccauauuuuugcaguacuucuggcuuuacagauaugucuguguaaucugaagcugcaauuaugg

SEQ ID NO: 394082 - RNA, 83 nt, Homo sapiens
uguuacuguccaaucuaauucugcaacgcugagaccucaugggauggguugcaugguggaacuuggagcuggcacggauaaua

SEQ ID NO: 394083 - RNA, 129 nt, Homo sapiens
gaggcugaggcaggagaaucgcuugaaccugaaggcagagcuugcagugagcugagaucucaccauuguacuccagccugggugacacaaguggaacucugucucaaaaaaaaaaaaaaaauggcaauu

SEQ ID NO: 394084 - RNA, 79 nt, Homo sapiens
ggaauggggacaaauggccacugaccuguguugaaauaauuucacaccaggagcagugccagauguuucacccaucuuc

SEQ ID NO: 394085 - RNA, 61 nt, Homo sapiens
aauaccagaggaagcaaaaugguucaugcuucuggaccucaaggaugccuucuucuguauu

SEQ ID NO: 394086 - RNA, 109 nt, Homo sapiens
gggagcucccagggcucagcaaauuguccuacugguuugagucauaaggauaacuaaaacggguaccaagcucaaauaggagauuugugaaagaucaagggaaccuccc

SEQ ID NO: 394087 - RNA, 64 nt, Homo sapiens
agaggacaauugagacagaagcuguaguagaggucccuuuacaagaugucuguccaacacuucu

SEQ ID NO: 394088 - RNA, 55 nt, Homo sapiens
uugagauggagucucgcacugucgcccaggcuggagugcauuggcacuaucucgg

SEQ ID NO: 394089 - RNA, 58 nt, Homo sapiens
aacagugcuuucaauguucaguauccuuuacaucugcugcucagcuggaaacacuguu

SEQ ID NO: 394090 - RNA, 70 nt, Homo sapiens
gagggaggaacaguggcucucauuuugaacuaggauaaacacuucuuggugagaccaauguacuaccuuc

SEQ ID NO: 394091 - RNA, 60 nt, Homo sapiens
cugagcuuguuuuccugcaacuagauggucccaucugggggugaugggagacagugacag

SEQ ID NO: 394092 - RNA, 67 nt, Homo sapiens
gaaguuaugaaaucuuuccugugaggaucagauacaugucauuuccaucugaaguuuucaggacuuc

SEQ ID NO: 394093 - RNA, 62 nt, Homo sapiens
guucccuaacuuuccaugagaaaucuaaggcacagaccucauucacaagggaaguagggggc

SEQ ID NO: 394094 - RNA, 56 nt, Homo sapiens
uuggaaugguaggcuaucucauaucgccuaggugugugguaggcuauaccaucuag

SEQ ID NO: 394095 - RNA, 95 nt, Homo sapiens
ggcaaggggugacuccagucaagugcuuucuuggggauuuagugagguuagugacacuagccaagaauaauguacuugcuggagggaucagugcu

SEQ ID NO: 394096 - RNA, 74 nt, Homo sapiens
ggggagccuccauauuguuuucuguaauggcuguacuaauuuucaauugcaucaacaguguacaaggguuuccu

SEQ ID NO: 394097 - RNA, 94 nt, Homo sapiens
ugcuuagcguguacaucuugguucuucuugcuauuucuaucaucuucaauguauuaaaagcuguuugagguguaaggacaacagagacuaagua

SEQ ID NO: 394098 - RNA, 100 nt, Homo sapiens
ugcagccaagagccuggggagagcuggcugcuguccagcccaccggcuggguccugcaguggacagugaaugccacuccucccucccccuaaucacugug

SEQ ID NO: 394099 - RNA, 56 nt, Homo sapiens
cuugagcucaggaguuugagaccagccuggucaacacagcaaaacccugucucaag

SEQ ID NO: 394100 - RNA, 60 nt, Homo sapiens
gugccguggugguuugcuguaccuaucaaccaucaccuagguuuuaagccccacgugcau

SEQ ID NO: 394101 - RNA, 106 nt, Homo sapiens
ugagauggagucucacucuguugccuaggcuggagugcaguggcgcgacgcgaucucggcucacugcaaccucugccucccagguucaaacgauucuccugccuca

SEQ ID NO: 394102 - RNA, 72 nt, Homo sapiens
gauucuuguguguguguguaaaugucugggcuacaugagaaaguuuuuacauguauauaaugcauagcgauc

SEQ ID NO: 394103 - RNA, 66 nt, Homo sapiens
gguggcuuuuugugauggcugacuuagucugaauaaccugcuaugccauugucagaaagggccauc

SEQ ID NO: 394104 - RNA, 108 nt, Homo sapiens
cuucuagaugaaacugaguugugucucuccuggaagcacguguuugugguugagguguaauagguaggugguuuuaggcagagacaucuuuaguauuguauauaggag

SEQ ID NO: 394105 - RNA, 56 nt, Homo sapiens
auuugagaaacaccggacgcugccagcauccugggaaguccacgugcuuuccagau

SEQ ID NO: 394106 - RNA, 69 nt, Homo sapiens
ccagguuucuuaugcaacuugaaauuuuccggauguucauaugcugcaaaauuuugcguuguauccugg

SEQ ID NO: 394107 - RNA, 122 nt, Homo sapiens
auacacacacauauccauauauauacacacacacacacauauauauacauauguguguauacauacauacauacacuagggaugugguguguguguguguguguguguguguguguguguau

SEQ ID NO: 394108 - RNA, 129 nt, Homo sapiens
auuuuugacccuuuccagaaugguuucaguacacuauugagguuuguuugcagggaaugagcugcacagauagauuucaguggguaacuaaaaauugaaauagaaagugagaaaguggaacuagaaaau

SEQ ID NO: 394109 - RNA, 120 nt, Homo sapiens
ccauuccugugcacuuaaccucaggaaauaauuugauagaagaaaaacauccuguaugcccagagauguuuguuucacugucacccaugagauuggcaugcuuuucaacagcaggggugg

SEQ ID NO: 394110 - RNA, 79 nt, Homo sapiens
cuuuguaaacagggcccagcucuauugaauuacaggucgcaggucugugaucaaccugcagggcuggaccuguacagag

SEQ ID NO: 394111 - RNA, 78 nt, Homo sapiens
aaaaaaaauuuagauauauauauaaugggggaaucauaaacguguggaagucuucauuauguauaguaaguuauuuuu

SEQ ID NO: 394112 - RNA, 79 nt, Homo sapiens
uuggguugguggaaaauuauugcuguuuuugacauuacuuuuaauggcaaaaaccgcaauaacuuuuacaccaaccuaa

SEQ ID NO: 394113 - RNA, 72 nt, Homo sapiens
uacuuccaagacauacaacauucuacuacguggacgcuuuccacugaguggcaaugugauguccugaaagua

SEQ ID NO: 394114 - RNA, 116 nt, Homo sapiens
uugguguugguguacgggggauugaucauuagguggaacacacaggagaucuaagaugcugaaacaauucuguguaauacucuaaugaugcauacuugccauuacacccuuaucaa

SEQ ID NO: 394115 - RNA, 72 nt, Homo sapiens
uuaauaaguagcuuauauaugcauguguaugugcauaaugcaguagaauguauguauaacgcaagagauuaa

SEQ ID NO: 394116 - RNA, 84 nt, Homo sapiens
ucauacauagucuucuuuugguuauuuuucuguuauuuauuuuuagccuaauugcacuauaaucggagaguaugauuuguauga

SEQ ID NO: 394117 - RNA, 72 nt, Homo sapiens
cgugauauugagcuuuuuaaaauauaguuguuggccacauauaugacuucuuuugaaaagugucaguucaug

SEQ ID NO: 394118 - RNA, 59 nt, Homo sapiens
gucagaugcagauuccaguucuccaggucuggguggggcugggacucuguaagucugac

SEQ ID NO: 394119 - RNA, 57 nt, Homo sapiens
agggaugggcuaguaaagacaaacuucacacugacugugaaacucagacucauccuu

SEQ ID NO: 394120 - RNA, 64 nt, Homo sapiens
ucccuuuugauuucugucuuuuggguucauggucauuaguaucuccacuauagaaugaaaggga

SEQ ID NO: 394121 - RNA, 117 nt, Homo sapiens
uuuuuuacauauaucuuuuuauaacuuuccaggaacuaagcacauuaucugauaauuguuguaaauuuuuuugucagugcuuuaguucaggaugggcaauaaauuauuucuaaagga

SEQ ID NO: 394122 - RNA, 78 nt, Homo sapiens
ugucaguuacacccagagauguccugagugauacagagaauuucugucagucauucacucacucggacaagaaagaca

SEQ ID NO: 394123 - RNA, 80 nt, Homo sapiens
aauugggaauuucccuguuguuucauaauuuuaguuaaauccucaaaacugaagcuaacaaguaggaagaguccucaauu

SEQ ID NO: 394124 - RNA, 130 nt, Homo sapiens
uucucuugucugauugcuccagcuaggacuuucaguacuauguuguauaggcauggggagaauggauguauuagucaauucugaugcugcuuauaaagacauacuugagacuggguaauuuauaaaggaa

SEQ ID NO: 394125 - RNA, 119 nt, Homo sapiens
cuuuuuuuuugucuucagcuuuggaccauugucaccaauuuugcaguaauagaaguccccuuccgcauucuguuauguuugauggaugaaucaugaaaccagccuaagagaaaggaaag

SEQ ID NO: 394126 - RNA, 114 nt, Homo sapiens
auuacaauaggauauuuagagguaaaggaggcaagcuuauguucuuuaucuaauuucacaugccaacagauugcuauuuauggauugucuccuugugccauuuccuauuguggu

SEQ ID NO: 394127 - RNA, 75 nt, Homo sapiens
aaugggaguucuguguuuuguguggcagguccucacaucucccuggauuccagcuccaucacagagucuuccauu

SEQ ID NO: 394128 - RNA, 81 nt, Homo sapiens
ugauauuggcuucauugaaugauuuuuagaagauucucuccuccucaauuuuuugaaaccauuucagugggauuaauguca

SEQ ID NO: 394129 - RNA, 58 nt, Homo sapiens
ugauggaagaagccaaguuuccugaguggccacuaggaaaacucugucuucuuuauca

SEQ ID NO: 394130 - RNA, 82 nt, Homo sapiens
ucgcuugaacccuggaggcggagguugcagugagccgagaucgcuuggcgccauugcacuccagccugggcaacaagaguga

SEQ ID NO: 394131 - RNA, 85 nt, Homo sapiens
gcucaucaauauucuugcaauuuuauuuacauggggauucuagaacacuaauaucuguguauagaugggggauagggaagugagu

SEQ ID NO: 394132 - RNA, 69 nt, Homo sapiens
uacaagauaauagcacuguagauggaggaaagguguuagauuuuucucuuugcauagcuaugaggugug

SEQ ID NO: 394133 - RNA, 81 nt, Homo sapiens
cacugucucaauugugcuaagguaccagcaguuuuaccuaccagguuuuuuugcacuauuaguauagaugucaauacagug

SEQ ID NO: 394134 - RNA, 55 nt, Homo sapiens
cuuugugcccuucugcccaucacccaccggcuuggucggcgaaggcggcacaaag

SEQ ID NO: 394135 - RNA, 81 nt, Homo sapiens
uuucauugacaguuggccaguaagugauucaacuccuaaccuuauucuuggaccacuccugaaacaacugucuuggugaaa

SEQ ID NO: 394136 - RNA, 129 nt, Homo sapiens
gcauggcguaggcugugcacucaugaccugguaugggguaggcuguauacucugugcucaucacuugauaugaagcaugguguaggcugugcacucauggccugguauggagcauggccuaggcuaugu

SEQ ID NO: 394137 - RNA, 55 nt, Homo sapiens
uauaugcaacauaguguauguguguaugugcacccaugcaugcuguguguaugua

SEQ ID NO: 394138 - RNA, 97 nt, Homo sapiens
aucuuuauccaaucguuuauuuuaaggcuuucccuauguaaaaugauaaucuuuaucuugugucuguaaacuuuaaugaauugauguuggugaaggu

SEQ ID NO: 394139 - RNA, 70 nt, Homo sapiens
auguaugucuugucuauggcugcuuuuguauuauggcagcuaaaccgaguagcuaucacagagacuacau

SEQ ID NO: 394140 - RNA, 86 nt, Homo sapiens
gaggauuguuugaaccugggaggcacagguugcagugagccaagaucgcaccacugcacuccagccuaggcgacacagcaagacuc

SEQ ID NO: 394141 - RNA, 89 nt, Homo sapiens
uaagccuauugugaagaaaccagaaaaguuuuuuaaaagcaaauaaauaacuagauagcuuuauuuuguuuuguuuuacaauggacuua

SEQ ID NO: 394142 - RNA, 55 nt, Homo sapiens
uccuuaaugcuacggcucuguguuugucccucagacaaguuggauggcuugagga

SEQ ID NO: 394143 - RNA, 59 nt, Homo sapiens
aauccuaauauaugccagcacauuuuaauugagaaauggcuauuucaugugguaggauu

SEQ ID NO: 394144 - RNA, 58 nt, Homo sapiens
agauaugccugcauguggaaccaauguauauuuacggugauccauugcagcauuauuu

SEQ ID NO: 394145 - RNA, 76 nt, Homo sapiens
uagcauaaauuaauaggauuuaccaggaauaacagaugccucugucauucaggaaauucuaaguauuuaaaggcua

SEQ ID NO: 394146 - RNA, 61 nt, Homo sapiens
gugaacagcagaugagugagugaagauucauuuguauuuagagccacucacuguugcucac

SEQ ID NO: 394147 - RNA, 79 nt, Homo sapiens
gcuucauagacaaagcagcaggucaguggccaggacccuggauucuggcccaguucugcguuuugcucucuaugugagu

SEQ ID NO: 394148 - RNA, 79 nt, Homo sapiens
uuucaauguauuugguuggugcaaaaguaauggcaguuuugccauugaaguuacuucuacaccaaccuaauagaugaaa

SEQ ID NO: 394149 - RNA, 110 nt, Homo sapiens
guuuugaauuuuuaaauggacauuuugguuaaauagguagcuaauauuguuucacaaugaccuaagaucccauuuaaucaaaugugucaacguuuuaauauuauuaaaau

SEQ ID NO: 394150 - RNA, 79 nt, Homo sapiens
cagagcccacggaugcccacagguggugccaccgaguuaacuuugaguagaucaccgugggagauccugccuugcucug

SEQ ID NO: 394151 - RNA, 78 nt, Homo sapiens
ucauuauucuuuuaggagagguaaugguugcugugaaaucaagcugcacgcauuguccuucuagucaugugauaauga

SEQ ID NO: 394152 - RNA, 75 nt, Homo sapiens
uugcuugagcccagaaguugaggcugcagugagccaugaucaugccauuguacuccagccugggcagcaaagcaa

SEQ ID NO: 394153 - RNA, 60 nt, Homo sapiens
uguccuacauuuucuuucauuuccccacccucauaaugaaauggcuuugaggguaggaca

SEQ ID NO: 394154 - RNA, 59 nt, Homo sapiens
gagaguagugucauuugucacuaagcaaauacuucuugacagugcuugaaauugcucuu

SEQ ID NO: 394155 - RNA, 67 nt, Homo sapiens
uguuuguucaacaaauaaugugacagugucuaguguuggcacuguuugauuaagugguggaaaaaua

SEQ ID NO: 394156 - RNA, 68 nt, Homo sapiens
guuuagagguaagugaagcaagaacuaggcuuucaaaaaauuuuggucucuuaaucacacuuuuaagc

SEQ ID NO: 394157 - RNA, 69 nt, Homo sapiens
ugcuccccugggugagcacuccccgccuguccuugccccucaccuggucccugcuccccugggugagca

SEQ ID NO: 394158 - RNA, 75 nt, Homo sapiens
uuuuaagcaugauugggguugggcacaauugacuucaaacucugaaucugcugccuaaugucauaugaaauaaag

SEQ ID NO: 394159 - RNA, 56 nt, Homo sapiens
guuugucccuuugcaguggcacacagggagcuauguguccacaagaggagacgaac

SEQ ID NO: 394160 - RNA, 85 nt, Homo sapiens
ggagggcaccauggcacuguaugaaaugugcugggcucaucuagcauauuaaggauucaguguugaauagacgugagugcccugc

SEQ ID NO: 394161 - RNA, 101 nt, Homo sapiens
ugagaugggaagaucgcuugaacccgggagguggagguugcagugagccaagauugugccacugcacuccagcuugggugacagagugagacucugucuca

SEQ ID NO: 394162 - RNA, 83 nt, Homo sapiens
ggcuaagaaggcucaagagcugcaguuggcaagcugaagacccaggauagcugauggugcaguucuagccugagucugaagcc

SEQ ID NO: 394163 - RNA, 81 nt, Homo sapiens
aauguguaauuggauuguaacauagaguaaaugcuugagggaguggauaccccauuuucuauguuguaauuguuacauauu

SEQ ID NO: 394164 - RNA, 57 nt, Homo sapiens
cccaucuuugugguuuuaucuaccuuuggucuuugaucauggugacguacagauggg

SEQ ID NO: 394165 - RNA, 63 nt, Homo sapiens
ugggaguugggcagaacaaguggcuugaguguguccuggacuuguuuguccugcccuuucuca

SEQ ID NO: 394166 - RNA, 61 nt, Homo sapiens
uagaaucacaguggucagguauagauugaaguagcaguuuacugaacugauuguggcuuua

SEQ ID NO: 394167 - RNA, 101 nt, Homo sapiens
agcuauaugugcauaccgccaugcauguauacagcuauacaugcauacaacugugcaugaauacagcuaugcgugcauaccaccacggugugugcacagcu

SEQ ID NO: 394168 - RNA, 56 nt, Homo sapiens
gcugguucuguuuauaugcuggauuacauuuauuguuuugcauauguugaaccagc

SEQ ID NO: 394169 - RNA, 59 nt, Homo sapiens
gaguagccaguauuuccacagagugggguuacuucuaauuugugcuaaucuggauauuu

SEQ ID NO: 394170 - RNA, 129 nt, Homo sapiens
acugugugcaugacugugugugucugguugggguggggucaucucauuuguggagagagcuucucuucgagauaaaagggaccucuuccugccagagaugaaagaaugaaaugguuuuaugcaaacggu

SEQ ID NO: 394171 - RNA, 76 nt, Homo sapiens
guuggaaguguguuuugagaugcgccaaaugaaccccugcucuuuguuauguaucucaagauaaacacguuucaac

SEQ ID NO: 394172 - RNA, 57 nt, Homo sapiens
uugaagguaggaugugcuaucaaacuacagaaaguguagccagucaacggccuucag

SEQ ID NO: 394173 - RNA, 57 nt, Homo sapiens
ucauucucucaucugugaauaaagaucaaauaguucugccucacaguguuaggauga

SEQ ID NO: 394174 - RNA, 88 nt, Homo sapiens
gccuacuacacagccaggauuuguaguguaccuaauguucuuaggcuacaaaccuauacagcaaguuacugugcugaauacuguaggc

SEQ ID NO: 394175 - RNA, 78 nt, Homo sapiens
uugaaccugaucucauuagcaccuuuagcuuuggcaguauaauuuugagccauguugaaggaaaugggauuuuaucaa

SEQ ID NO: 394176 - RNA, 63 nt, Homo sapiens
auggauuuauuaucagauaagucacuauuuauaaaaagcaugacuuguccagugauaguucgu

SEQ ID NO: 394177 - RNA, 74 nt, Homo sapiens
ugacccuguggcagcgucuaagggugaaugguuauagcuccugaagccccagugggcguguguuacagggugca

SEQ ID NO: 394178 - RNA, 56 nt, Homo sapiens
uugagauggaguuucgcucuuguugcccaggcuggagugcaauggcaccaucucga

SEQ ID NO: 394179 - RNA, 64 nt, Homo sapiens
gugggucucucuaguggcagaagcaaauugccaaauaauaguuugucugagagaggagaucuac

SEQ ID NO: 394180 - RNA, 82 nt, Homo sapiens
aguucuaggguacacgugcacaacaugcagguuuguuacauagguauacaugugucauguugguuugcugcacccaucaacu

SEQ ID NO: 394181 - RNA, 81 nt, Homo sapiens
acauuaagauuuguucaaucugagugauggguaaagcaauguuugcaauauccucuacuauagguucuacauguuuuaugu

SEQ ID NO: 394182 - RNA, 66 nt, Homo sapiens
gugccuuggaaaugguaaaggguuaauauacuuauuaaucuggcuaacauuuuuuagagagggcac

SEQ ID NO: 394183 - RNA, 130 nt, Homo sapiens
uacacggaaucagccucuacauaggcccagcagguggaacggggguuggcaguugucaauagugaaauguuugccacuuugcuaauccaacccucaucuccuuacagauccuuuguauggcaacccugua

SEQ ID NO: 394184 - RNA, 96 nt, Homo sapiens
ucccagucauacuccugacacaguguuccagcuauuugaaucagacaggcacuucuuuucaucugcaggaaugcugauguccuguguagaauggga

SEQ ID NO: 394185 - RNA, 88 nt, Homo sapiens
uuugauuagcuuaauacucuucuaaguaguccaaggguuaaagaauaaaucaaaagggcacuaagaaaguauuuuggauaaaauuaaa

SEQ ID NO: 394186 - RNA, 77 nt, Homo sapiens
ggcuuuuuuggauggucagaggguuucugugagugucucauaccccacguuuucaucuucugaccauucuuugagcu

SEQ ID NO: 394187 - RNA, 72 nt, Homo sapiens
gguuauuuucauagauaaagauaguaauagagaagaugaauaucuguuacugcucuuuugucaugaguaauc

SEQ ID NO: 394188 - RNA, 57 nt, Homo sapiens
uacauucugugacaugcgcuguuaagaaauuucguugugcaaacaucauagaaugua

SEQ ID NO: 394189 - RNA, 84 nt, Homo sapiens
cuuugggcuacuuucuucacuuuguuaaacuccaauuuccuuauauaugaauugaggguaaagggaagugauaaguucccaagg

SEQ ID NO: 394190 - RNA, 101 nt, Homo sapiens
ucagaucaucaggcauuagguucucauaaggagugcaugaccuaggucccucacaauagggucuggccuccuaugagaaucgaaugcugccacugaucuga

SEQ ID NO: 394191 - RNA, 74 nt, Homo sapiens
ccuugaaguagguucucguaucgccgugcugauuuuagcacuggagcagggacgggcggguaacuugcugaagg

SEQ ID NO: 394192 - RNA, 58 nt, Homo sapiens
uagaauuuuaccuggaaaaggcaucauggccuuuguacucccuuuagauaaaauucug

SEQ ID NO: 394193 - RNA, 67 nt, Homo sapiens
ucuuuggagcuguugguuugaaagaauuugucuuuggaacaagcuuuuuaucagucagcuuuaaaga

SEQ ID NO: 394194 - RNA, 89 nt, Homo sapiens
ccugagcuuuuccacaaaaucaaugguucccaaguaauucauucuaaaacuaaugcuugagacacauaugaauuuggaggaaccuuagg

SEQ ID NO: 394195 - RNA, 74 nt, Homo sapiens
guuuguuuugagacugagucuugcuuugucaccuaagcuggagugccauggcacgaucucaguccacugcaaac

SEQ ID NO: 394196 - RNA, 77 nt, Homo sapiens
uaucuuuuugauauguuguuggauucacuuagcuaguauuuuguuaaggauuuuagcauauauguucaucaaggaua

SEQ ID NO: 394197 - RNA, 98 nt, Homo sapiens
cagggccuccaagcucacucagaaaucuuguguugaauggugcagagcuaaguuguucacucugcaguaucauauuagaagagauuugguuuacccug

SEQ ID NO: 394198 - RNA, 94 nt, Homo sapiens
ggcaggauaaucgcuugaacccggaaggcggagcuugcagugagccaagacugcgccauugcacuccagccuugugacagagcgagacucugcc

SEQ ID NO: 394199 - RNA, 57 nt, Homo sapiens
gacugagaguuucuggauaacauaaaccacguuucuguuaucauuacguucuuaguu

SEQ ID NO: 394200 - RNA, 66 nt, Homo sapiens
gugucagaaucugagacgacaacauuaggugcuugcaccugacguugucaucugagauucugacac

SEQ ID NO: 394201 - RNA, 85 nt, Homo sapiens
aguagaguauacuugagucguuaccuauaacagaggugucuguuaccuauaaucuauguuauagauaacgacucaaguaucuauu

SEQ ID NO: 394202 - RNA, 55 nt, Homo sapiens
uuagauacccuuuaguauaaaaucagaguccauaggcucugagaggauuaucuga

SEQ ID NO: 394203 - RNA, 70 nt, Homo sapiens
uuuuacccagcuccuauucgagaugcaguugcucugccguaacugccucugacauaggcaggaaguaaaa

SEQ ID NO: 394204 - RNA, 57 nt, Homo sapiens
caaggaaaagaaguauuucagaagcauccugcuuuuuaaaugcuagaauuuucuuug

SEQ ID NO: 394205 - RNA, 57 nt, Homo sapiens
ggcaggaagauggcuuaaauccaggaguuugaggcugcagugagcuaugauccuguc

SEQ ID NO: 394206 - RNA, 70 nt, Homo sapiens
ucugguuguugucggcaucuuuccaaaacacuguauuagcuguugcaguggaauguugccagcagccaga

SEQ ID NO: 394207 - RNA, 77 nt, Homo sapiens
caucucauucaauaggauuguuuaauccauucauauuuaauuaugauggauguaauugauucauguuggccaggaug

SEQ ID NO: 394208 - RNA, 96 nt, Homo sapiens
cugccuuucaacuucaucucucugacagugguuagcacuguacuuuacguguaguaagugcucaauaaaugcuuguggacuggaugauuggggcag

SEQ ID NO: 394209 - RNA, 55 nt, Homo sapiens
acacuucugcaaaucccagacgagaccccaaaauguuaugggauuuuuagggugu

SEQ ID NO: 394210 - RNA, 66 nt, Homo sapiens
augaugcugggauaacuggcuagccaauaugcagaagauugaaacuggaccccuuccagucaucau

SEQ ID NO: 394211 - RNA, 67 nt, Homo sapiens
gaucugucagugggauguugaagucacccacuauuauuguauggcugucuaucucauuucuuagguc

SEQ ID NO: 394212 - RNA, 56 nt, Homo sapiens
agugcauuugcaucucaauauaaagucacugcaugauauaccaaugcggaugcacu

SEQ ID NO: 394213 - RNA, 126 nt, Homo sapiens
gauuuuagauacuucaaccuuaaguugauauuauguaacugugguucagcagagauaagagcaggagauuuuuuugggaucauuaugcauaguguacauuggcuuuugguggggguacuuagaauu

SEQ ID NO: 394214 - RNA, 73 nt, Homo sapiens
aggcuggagugcaguggugcgaucuuggcucacugcaaguucugccuccuggguucgcgccauucuccugccu

SEQ ID NO: 394215 - RNA, 100 nt, Homo sapiens
caaggcugcuuuguuucuuuguauguguagcccccgacagggauggggcaguguuucuucugucuagagggcacaugaugcuggaaucauggcaguuuug

SEQ ID NO: 394216 - RNA, 96 nt, Homo sapiens
uuugucauggcagcuugagcagaugaauacaccugcuaaaauuuaaaaguguuucagauguuuuguuuaucugcuuuaguuacuugaaauaacaaa

SEQ ID NO: 394217 - RNA, 124 nt, Homo sapiens
gaguuggugaggagguacauacuggguccuccaaugagaucaugaaaaaccacugggcuuuauucuggugucaugaagguuuuaugcagggcaguaacccagacuguguccuucucccaaauuc

SEQ ID NO: 394218 - RNA, 59 nt, Homo sapiens
gcuguucauugagauuguuuccaaguauuugcuauuggaagucaugcugcaagaacagc

SEQ ID NO: 394219 - RNA, 76 nt, Homo sapiens
ucacuugaaccugggaggcagagguugcagugagccgagauugcacuguugcacuccagccuaggugacagaguga

SEQ ID NO: 394220 - RNA, 72 nt, Homo sapiens
gaaagcccugccuggggggaaguagggggcagcuuuugucuuccccugagaccccucagcacugaaguuuuc

SEQ ID NO: 394221 - RNA, 80 nt, Homo sapiens
guaucuccgagcucccagagaguugcuguagugagugcugaaugucuauggcacuaguacuggaaagcaauguggagugc

SEQ ID NO: 394222 - RNA, 61 nt, Homo sapiens
uucaaaguguugguuuugggcugggcgcgguugcucaugccuguaaucccagcacuuuggg

SEQ ID NO: 394223 - RNA, 55 nt, Homo sapiens
caguuggguacaauguacacuauuuaggugaugaguacauuaaaagcccagacug

SEQ ID NO: 394224 - RNA, 68 nt, Homo sapiens
ucuuuugcagcuguagaaaggacucaacaaagaaagcuugaagaauuacuuuuagcagcagcaagaga

SEQ ID NO: 394225 - RNA, 79 nt, Homo sapiens
uaagagaguuaaagaauaagaaacaaagucuguauauuuacccauacaguugccauuucuugugcuugucauuuucuua

SEQ ID NO: 394226 - RNA, 58 nt, Homo sapiens
ugagacugagucuugcucuauugcccaggcuggaaugcaguagcgcaaucucagcuca

SEQ ID NO: 394227 - RNA, 99 nt, Homo sapiens
auugagcaggggcuguggauagaaauuuccuguaggggcuugcgaaggcaucuucacugguccuuuauaggaacccucuaugcauuucccuuugccagu

SEQ ID NO: 394228 - RNA, 73 nt, Homo sapiens
cugguugaucuugauuuugugagcagguuaucaauaucaauucaugauauugccugucuccaaaaaucacugg

SEQ ID NO: 394229 - RNA, 73 nt, Homo sapiens
gcugauguggcauuucccaaaguauucucugagaacuaguuucucaagaugcucaagggaaaagccacccagu

SEQ ID NO: 394230 - RNA, 58 nt, Homo sapiens
uaaauauucaggugugcccaaaucuuagaagaagaggaagggcaaaucuggaaauuua

SEQ ID NO: 394231 - RNA, 75 nt, Homo sapiens
guaaaaaugaguguccaaguaaggugaaauacaaguuuucucauuuuauuuuacuuaccguggaucucuguuuau

SEQ ID NO: 394232 - RNA, 56 nt, Homo sapiens
ucuugaacuucugcacacucagcgaaaauuaugcucgcguugugagagguccaaga

SEQ ID NO: 394233 - RNA, 60 nt, Homo sapiens
ccacaggugaugacauuugaaccaagccuuaaagaauuggcaagaauucuuaccgugugg

SEQ ID NO: 394234 - RNA, 129 nt, Homo sapiens
ucuuuuugcucauuaacauuauuuucuuucagauugaagaacuuucuuuagcauugcuuguggcacaggucugguguugaaauucuucagcuuuugucugggaaaauauuucuccuuuaugucugaaga

SEQ ID NO: 394235 - RNA, 115 nt, Homo sapiens
ggucucaugcugccacccaggugggaguacagugcuguggucaugggucugugcagccucaaacuccugggcacaagccauuccucucaccucugcuuucuguguagcugggacu

SEQ ID NO: 394236 - RNA, 75 nt, Homo sapiens
uuagguacuuaagaucucagcuaugcaaugagggucagcaacacuaaauguuagcagggauacaaggucgccuaa

SEQ ID NO: 394237 - RNA, 58 nt, Homo sapiens
uguuuuuaaaccaguccauuaacaauacauuuggaaauauggaccuggauuaacagca

SEQ ID NO: 394238 - RNA, 92 nt, Homo sapiens
guaugcaagauggccucagccaucucuuagggauucacuacaguuggauguggaauaaacuagagaggacugagagcccugcuuuggcguau

SEQ ID NO: 394239 - RNA, 82 nt, Homo sapiens
ugucugaguuuuuauacaggugcucuacagacaggacacucauucaagggggucuugaaaugcgauaggcauuuuucaggca

SEQ ID NO: 394240 - RNA, 87 nt, Homo sapiens
cuguuggaauauaguaaugccauugaguuuuguauguugauuuuguauccugcaauguuacugaauguguuuuaucaguuccaauag

SEQ ID NO: 394241 - RNA, 79 nt, Homo sapiens
cagagcuauacauccauuugcuuuauuugcugaucuuuugaagauguuacuaguuguggagaagugauguauuguuuug

SEQ ID NO: 394242 - RNA, 62 nt, Homo sapiens
cuggguugaauguuguugguugagauauaauuuguuugggucucaaauuuugauauuuccag

SEQ ID NO: 394243 - RNA, 78 nt, Homo sapiens
aaggaggaucccagcuccagccccuggugcccugggguggguucugcaggacaccugguguggaacuggagucuccuu

SEQ ID NO: 394244 - RNA, 65 nt, Homo sapiens
aggucagagcaauguauugcuucugguuuguuaagcaauguguagcagugcauugcuucugauuu

SEQ ID NO: 394245 - RNA, 76 nt, Homo sapiens
caggcccagcagggagaccaucucuuccuuaggacuugccuuaggucccauguccucccugaccacugauggccug

SEQ ID NO: 394246 - RNA, 68 nt, Homo sapiens
accucucuuuggaugccuuaggguuagaggaugccccuaacuuugggcagcaucccaaaguuagaggu

SEQ ID NO: 394247 - RNA, 76 nt, Homo sapiens
ugccuccauagcaggaagaaagcuacucaggagacagcucuuaucacugagacacucuuaucugcauaacaaggca

SEQ ID NO: 394248 - RNA, 85 nt, Homo sapiens
ggagaaucgcuugaacccaggaggcagagguugcagugagccaagauugcaccacacuccauccugggcaacagagagagacucc

SEQ ID NO: 394249 - RNA, 66 nt, Homo sapiens
uugccauguguguaaggugcugugaacugugagugcugaagauucgcagcauucaauaccaggcag

SEQ ID NO: 394250 - RNA, 128 nt, Homo sapiens
cuuugauuuugacgagcaaaagcccuuguuagcauauaccaugcaguccaauaugcacauauuggaauauaugcauauuggacugcauggcauauccuaacaagggcuuuugccuguuaaaaccaaag

SEQ ID NO: 394251 - RNA, 93 nt, Homo sapiens
caugagauuuggugaggacacagauccaaaccauauaauuccacuccuggcaucugcaaaucuuauguccucacauugcaaaauacaaucaug

SEQ ID NO: 394252 - RNA, 68 nt, Homo sapiens
uccaugucagugauugauuuaaagacgugauuggauaacacuugucuguugauugaauuacugaugga

SEQ ID NO: 394253 - RNA, 74 nt, Homo sapiens
cuguauccucagagcccuuguuauguuaucauaugaaugaauauccaugccauagguuuugagaagccauauag

SEQ ID NO: 394254 - RNA, 89 nt, Homo sapiens
ggagaauugcuugaacccaggauagggagguugcagugaacugagaucgugccauugcacucuagccugggugacaagagcaaagcucu

SEQ ID NO: 394255 - RNA, 126 nt, Homo sapiens
uuaauuuucugccuuuuugaguuucuccaguuauccuggaagcauagcagcguguguguccuuggguaggacccacuugcugugcauuccacuuugcacauugagaaaccaggcccagagaauuga

SEQ ID NO: 394256 - RNA, 87 nt, Homo sapiens
uuggcaagaucaauguaaguggauuucaaauuccauaaggaacugauuugguggagaacauucauuugcaagaguagauuuagcuaa

SEQ ID NO: 394257 - RNA, 84 nt, Homo sapiens
gauggggaacucaagaagcaguguucaagaagaagagaugggugcaauacuaugucuagaaaagccugccuucuugagcucauc

SEQ ID NO: 394258 - RNA, 99 nt, Homo sapiens
ugagauggagucucgcuguugccuaggcuggagugcaguggcgcucucuuggcucauugcaaccucugccucccggguuccagugacuuuccugccuca

SEQ ID NO: 394259 - RNA, 104 nt, Homo sapiens
aguggcccuugggaagcugcacagagagaagaaugaacaugaguucuggugucagagauauuuaaacucacauucuuucuugguacuaguuuccuuuggccauu

SEQ ID NO: 394260 - RNA, 70 nt, Homo sapiens
uuguuuugagacaaggucucaauuugucacccaguuuggagugcaguagugugaucuuggcucacugcag

SEQ ID NO: 394261 - RNA, 69 nt, Homo sapiens
uauagcuuuuuagggaauuuggguaaacucagugagcgugggugagucaaauggacuggggugguuaug

SEQ ID NO: 394262 - RNA, 80 nt, Homo sapiens
gugcguuauuagagcaaguuuucugacauauaaaccuggucccauauuauuuaucuguuuaaaacuguucagugauguac

SEQ ID NO: 394263 - RNA, 57 nt, Homo sapiens
uggacaagugcccuccaccucaacaguuuccccugcaaggugaggaggaacuuucca

SEQ ID NO: 394264 - RNA, 85 nt, Homo sapiens
agagugcuuuuaccuuauggcuuagcaaaggcuguuaaguauauucuuuuguauuuacaguuuucuaggcuaccaggaguuuucu

SEQ ID NO: 394265 - RNA, 90 nt, Homo sapiens
agagguuugggguaugagugaacccauuacccagguagucaguauaguacccaauggguaguuuuucagcucuugcccuccacccccucu

SEQ ID NO: 394266 - RNA, 117 nt, Homo sapiens
ugcagaaaaaugagaggcaagaggccauucuggaauguaaaguuuaugggccguauugcaaauacaaauagcuucuuuacuuucuagaaauaaauaggucugugucuuuccuuugca

SEQ ID NO: 394267 - RNA, 60 nt, Homo sapiens
ugacauggagggugcggcugcaggccccagguacauucccagcagcugcccauccuguca

SEQ ID NO: 394268 - RNA, 69 nt, Homo sapiens
gcacuaguuuuagucccauuuuacagacaggacauggaaaccuaucuguaaagaucacagagcuggugc

SEQ ID NO: 394269 - RNA, 101 nt, Homo sapiens
uagcugcuaccucucacaaauuggcaaucgucuccauuuuuacacccuauauggaaugcaaaaauagaggggauugucaguucuaugaggugcugcagcua

SEQ ID NO: 394270 - RNA, 58 nt, Homo sapiens
uuugcgcuuuuccuauguugcccuggagagcagaucuagggagcguggaaggugcaga

SEQ ID NO: 394271 - RNA, 64 nt, Homo sapiens
cagauauagcuaugggauguauuugcaagacagaacuuagcugaacuugcauagcuguuuccug

SEQ ID NO: 394272 - RNA, 63 nt, Homo sapiens
aagauuuggauuccuaauaagcuuuccuacuuaagaaagugaggaucucuaggaauuuaucuu

SEQ ID NO: 394273 - RNA, 74 nt, Homo sapiens
ggugcuuucaccagcuggcauugaauaccugugucuuuuccaggugcauggugcaagcuguugguggaucuacc

SEQ ID NO: 394274 - RNA, 87 nt, Homo sapiens
aucugugguggacagccugggaucuggucacaguccugguugggcuaacuccugacaguuuccagggcugucucuagcaucacagau

SEQ ID NO: 394275 - RNA, 59 nt, Homo sapiens
uuuacagcacugaagccaggggaauuacguggucccuccccugguguuuggaguuugag

SEQ ID NO: 394276 - RNA, 60 nt, Homo sapiens
uggcaagaccccaucucuacaaaaaacugaaaaauuagcugggagugguggucugugcca

SEQ ID NO: 394277 - RNA, 64 nt, Homo sapiens
uauaaauggauuaaguucacuugcuuagaaacacaauaagcagguuggaaaaaaucuaccuaua

SEQ ID NO: 394278 - RNA, 61 nt, Homo sapiens
cugguaaccaucgagcaaaaguagucgauaaaaguguuauugcuaaaacucaugguugcag

SEQ ID NO: 394279 - RNA, 61 nt, Homo sapiens
uccgugcuuuaaaccacugugcuguacugccgaguacaguauaaugcuguagggagaagga

SEQ ID NO: 394280 - RNA, 108 nt, Homo sapiens
aauuggauuuagaagucuauggaaauuauuaggaagauggguuuuaagugaccaguuuuuuauacaucuucuuugacagugauuugugcauaagcuucugaaguaguu

SEQ ID NO: 394281 - RNA, 58 nt, Homo sapiens
ggaguguuuucuaauuuucuuuguagaggacuuucacguccuugguuagguauauucc

SEQ ID NO: 394282 - RNA, 95 nt, Homo sapiens
ggccaggcacaguggcucauuccugucaucuuagcaauuugggaagccgagucaggcagaucaccugagguuaggaguuugagaccagcuuggcc

SEQ ID NO: 394283 - RNA, 62 nt, Homo sapiens
gcaucuagcacagugucauucuagguacugaauagguaucuguuaacaucugugcagcaugc

SEQ ID NO: 394284 - RNA, 57 nt, Homo sapiens
gggguuccuggccugucagaaagugacauucuuuacuuaucacaggucagaaacccu

SEQ ID NO: 394285 - RNA, 61 nt, Homo sapiens
gaagcaguguggacuaaugggaagagacacaacauauucuucuccaguuucucauaguuuc

SEQ ID NO: 394286 - RNA, 109 nt, Homo sapiens
acagcaugguggcauuuuccccaagaaguuuggccauggagcacuuuucuagaacaugcuaggagacuaaagcucuguggcacacgccuggguuggucugucaugcugu

SEQ ID NO: 394287 - RNA, 89 nt, Homo sapiens
cuguaggaauaauguucacuauuuaaaugauggugaugauauaauuuaucacacugcaucuguuggaauucugcacaauguugcuacag

SEQ ID NO: 394288 - RNA, 99 nt, Homo sapiens
gaggcaggagaaucgcuugaaugcaggaggcagagguugcagugagcugagaucaugccacugcacuucagccugcgcaacagagcgagacuccgucuc

SEQ ID NO: 394289 - RNA, 71 nt, Homo sapiens
ucacguugggcaguguauuacuuaggguucucuagagggacagaacuaauagguaauauacauguauguga

SEQ ID NO: 394290 - RNA, 100 nt, Homo sapiens
cagaaaaauaaggacaguuuauuugagcaacauagugagacuguccuauccuuaaaaggacagucucacuauuuugcucauuuuauuguuuugcacccug

SEQ ID NO: 394291 - RNA, 107 nt, Homo sapiens
ucaacggguuugauuuuuggggaagccucuuauagcaggaaucuguccagagauuacagcaugggguuggcuacucagaagggaagaggaaaaaggaaacauuuuga

SEQ ID NO: 394292 - RNA, 63 nt, Homo sapiens
gauauugguuguggguuugccaaaaauugcuuuuguuauuuugaggcauguaccaucaauauc

SEQ ID NO: 394293 - RNA, 76 nt, Homo sapiens
agaggauccuagugcacuacuugugggaauguaaguugguacugucauuacgaaaauuaguguacagguuuccuuu

SEQ ID NO: 394294 - RNA, 81 nt, Homo sapiens
acacuauacuuccauugcugguggccuugagaauagaaacauuuggcucagcaagaaucugggaguaaaauucuuuggugu

SEQ ID NO: 394295 - RNA, 99 nt, Homo sapiens
caggaacaggccauuuucacuucuuuugugauuccucaguuacuucaggccaucuggauguauacgugcaagucacaggggauaugauggcuuagcuug

SEQ ID NO: 394296 - RNA, 117 nt, Homo sapiens
gagaauauugaauguuuccaacacaagaaaugauaaauguuugagaugauggauaucuaauuacguugaucugauccccucacauuauuauaugugucaaagcaucacaauguacuc

SEQ ID NO: 394297 - RNA, 56 nt, Homo sapiens
aguccagguuuuguaauggcaaacauacacccugcaugaccauucaccccuggacu

SEQ ID NO: 394298 - RNA, 100 nt, Homo sapiens
gaggcagggagaaucgcuugaaccugggaaguggagguugcagugagccgagauggugccacugcacuccagcuuuggugacagagugagacuccgucuc

SEQ ID NO: 394299 - RNA, 80 nt, Homo sapiens
cuucuuagggugagucaaucugagggguucagcacuguccucaagucuuagccccguaucaguuugagcuccccuggaag

SEQ ID NO: 394300 - RNA, 89 nt, Homo sapiens
ggagaaucgcuugaacccaguaggcggagguuacagugagccaagauggcaccauuguacuccagccuuggggacaagagagaggcuuc

SEQ ID NO: 394301 - RNA, 75 nt, Homo sapiens
guuccuucaagaugccaucuuuauuucugaaucccccaugcccugugugaugacauucagagaugaaggaggaac

SEQ ID NO: 394302 - RNA, 84 nt, Homo sapiens
ggguccagaauuguuuucaggcagggagcuucaguggucuguggguccacugaucuugagcugaccugauugcacuacugaccu

SEQ ID NO: 394303 - RNA, 59 nt, Homo sapiens
ugagacugaguuuugcucuuguugcccaggcuggagugcaacgucacaaucucagcuca

SEQ ID NO: 394304 - RNA, 79 nt, Homo sapiens
uguaacucaggauuccauuuguggcuauuuacuuuagagaaacucaugugcaugggcauaagggaauccauuuauuaca

SEQ ID NO: 394305 - RNA, 81 nt, Homo sapiens
uuacuguaggccucagagguuugaaaugucuuuucuuuguuucuacgaaaaguguguuuccaaccuguggaaucauaguaa

SEQ ID NO: 394306 - RNA, 57 nt, Homo sapiens
cugguuuugucagaagcuuuauuucauugaugguuuacugcaucuacuuagagccag

SEQ ID NO: 394307 - RNA, 65 nt, Homo sapiens
uuauuaugguccaagagucagugauaucacaucugagauauugacuuucucuuagaucaggauga

SEQ ID NO: 394308 - RNA, 84 nt, Homo sapiens
aagguagccagacaccuagguauguaugucuguacagcgucacguacuuacguugcuguugaggggcugcaccuucuggaccuu

SEQ ID NO: 394309 - RNA, 67 nt, Homo sapiens
uuaugccuauugugccuuggaucuugaaaaacgugguaaaacuggccaauggugacggcaggcauag

SEQ ID NO: 394310 - RNA, 76 nt, Homo sapiens
cucccccaacggcagguucaucccgcggcauccagacgagcuggagcuggauguggaugacccuguguugguggag

SEQ ID NO: 394311 - RNA, 83 nt, Homo sapiens
uucaguggacauguugugaagaugugaagcaagcaggucauucccaccuccuuucaucauauuuaucauauaugguggcugag

SEQ ID NO: 394312 - RNA, 130 nt, Homo sapiens
ggguugaugguggaguuuuaccuuuguucucuaacuacuucuaaguuuuggaagaaacaggaggacccauguuucuuccaaaacuuagagguagaauuggaaaacgggugaauguuuucuuccagaacuu

SEQ ID NO: 394313 - RNA, 77 nt, Homo sapiens
acuacaguaauguuaaucuuuguggagcuauugcacuuaacuugcuugcaucauucagauucagcauuacuuugagu

SEQ ID NO: 394314 - RNA, 69 nt, Homo sapiens
gcuauugugaauagugcugcaauaaacauacgugugcaugugucuuuauagcagcaugauuucuaaugc

SEQ ID NO: 394315 - RNA, 108 nt, Homo sapiens
uuucuuugcagcccuguguccaagcaccguugccuccccugcaucccauuucugucugggaugguugugcagggggcaauggugcuuggacacagggcugcaaagaaa

SEQ ID NO: 394316 - RNA, 58 nt, Homo sapiens
agacuugaggccagguugugcccuuguucagcguugggcagaucauuggccucaguuu

SEQ ID NO: 394317 - RNA, 61 nt, Homo sapiens
ggggagaugcugucugcagcugggcagcgccagaaggccugugacagcacagcaucucuuu

SEQ ID NO: 394318 - RNA, 76 nt, Homo sapiens
aaggaaaggaaggaaagugcacuuggaagagggccaggcgggcgacguggagggcaagugccucuuuucucuccuu

SEQ ID NO: 394319 - RNA, 59 nt, Homo sapiens
augacauagaagcaauccccuaacaccaugucugacauaaaguaguugcucugugucau

SEQ ID NO: 394320 - RNA, 55 nt, Homo sapiens
guacccuggaacaacccaauuuggacugcaaguauuaguugggucuuccaggugc

SEQ ID NO: 394321 - RNA, 93 nt, Homo sapiens
cuuuacaggcauaggcuguuacacugugcacuaaauuugagaauucggaacagcuaucagaaugcauuuuguguagcuaugaugccuguggag

SEQ ID NO: 394322 - RNA, 93 nt, Homo sapiens
ggagaaucgcuugaacccgggaguggagguggcagugagccgagaucaugccauugcacuccagccugggcgacaagagugaaaagagucucc

SEQ ID NO: 394323 - RNA, 83 nt, Homo sapiens
guggggugggagaugggcugugaauaaggcuugggucugaacucuaacccuuacaacuacacucgucuuuuucaguucuucac

SEQ ID NO: 394324 - RNA, 63 nt, Homo sapiens
uuuccuuuggguauucucccuuggggcuaaugaguuccauuaggcuuauuacccaaugugaga

SEQ ID NO: 394325 - RNA, 67 nt, Homo sapiens
acaacugucguuaauuuggcuuugcuuuacucucaccuuguguauaagugaguaauacgucaguugu

SEQ ID NO: 394326 - RNA, 55 nt, Homo sapiens
ugagauggguaauuaaauggugaauguauucacauguuuucaauugcugaucuca

SEQ ID NO: 394327 - RNA, 92 nt, Homo sapiens
uaggcaauggaauggucuaugauucccuuggucaacggaugcaacgcucagcucuuugcgucucaccaagugaaauaagcuucuucggccug

SEQ ID NO: 394328 - RNA, 61 nt, Homo sapiens
uuuuuuaaugggucucaaaauucugugacaaauuuuuggucaaguuguucccauuaaaaag

SEQ ID NO: 394329 - RNA, 88 nt, Homo sapiens
caaagugacagcgauucuggcuugugaacugucuucucacuugggacugagauuaacagcauacaggucaauuauugcugucauauug

SEQ ID NO: 394330 - RNA, 84 nt, Homo sapiens
ugugauuauaggacauauuuuaauaacucaaguagaaaaauguaaaagaauuuagcugagaguugaugaaauaugguaaucaca

SEQ ID NO: 394331 - RNA, 78 nt, Homo sapiens
uugugauuauuaagugcuugcagaaguccaugaccucgguguuauaggcuucuaaagugcaaguacuauacuucauaa

SEQ ID NO: 394332 - RNA, 60 nt, Homo sapiens
ggaagaaagguggacaacagguggccagcagugguccaccugugguuauuuuacucuucc

SEQ ID NO: 394333 - RNA, 75 nt, Homo sapiens
uucuugcuuguugggucaguuccuugacuccucuuaguuggggaggaucaggguaaugaucgaaaaugaagagaa

SEQ ID NO: 394334 - RNA, 56 nt, Homo sapiens
uugagauggaguuuugcucuuguugcccaggcuggagugcaauggcaccaucucag

SEQ ID NO: 394335 - RNA, 56 nt, Homo sapiens
uugagauggaguuuugcucuuguugcccaggcuggagugcaauggcgccaucucgg

SEQ ID NO: 394336 - RNA, 97 nt, Homo sapiens
gagccaugaucuugacacuggacuccagccugggcaacaaaacaagaccaucucacucuguugcucaggcuagaguucagcuacacaaucauagcuc

SEQ ID NO: 394337 - RNA, 61 nt, Homo sapiens
ucaguagcugaaucaaucaagucaaacaaagaauaucagagcuugaagacuaugcugcuga

SEQ ID NO: 394338 - RNA, 65 nt, Homo sapiens
gagcucaggaguggcuuuggcugcaucuuucucauagugaugaauugucagucacugccuggcuu

SEQ ID NO: 394339 - RNA, 94 nt, Homo sapiens
accccaugacauugauuagcacaucuucuuggccugcaacucauucauaugugcauauuuugucggcccaaugagaguguuagcagaaaggggu

SEQ ID NO: 394340 - RNA, 55 nt, Homo sapiens
ugagaucaugucauuugcacuccagccugggcaacaagagcaaaacuuggucuca

SEQ ID NO: 394341 - RNA, 60 nt, Homo sapiens
uucuggggguauuuugauuuguggacguggagaaagugguagagagcaauaccuccagag

SEQ ID NO: 394342 - RNA, 74 nt, Homo sapiens
cccuuuuaugacuauugcacuuuccugguacagaugagggcuucuacuaggaagguggcagugaggagggaggg

SEQ ID NO: 394343 - RNA, 112 nt, Homo sapiens
ucagaucaauaguagcaaauucucauaggagcacgaacucuagugugaauugugcauauaaagggaucuacacugugugcuccuuaugagaaucugaugccugaugaucuga

SEQ ID NO: 394344 - RNA, 60 nt, Homo sapiens
gcugacacugggcuauagaucuguguguucugcaaaagcagguaguaucucauugucagc

SEQ ID NO: 394345 - RNA, 83 nt, Homo sapiens
guuuucuacucagguagcuagauuaugugagacucaucagagcuuuaaaacugauaagcauagucuagcuaccuuugggaagc

SEQ ID NO: 394346 - RNA, 55 nt, Homo sapiens
uuccuuucauauauuaguucugucccucuggagagcccugacuaauacaaaggaa

SEQ ID NO: 394347 - RNA, 76 nt, Homo sapiens
gaucucagcucaccacaaccuccgccuccuggguucaggcaauucuccugcuucagccuccggaguagcugggauu

SEQ ID NO: 394348 - RNA, 74 nt, Homo sapiens
acagaagaaguucaaggugaagucuggggcuauacauuucaaggucauuuauguuucacugugaguuuuucugu

SEQ ID NO: 394349 - RNA, 82 nt, Homo sapiens
aguucuaggguacaugugcacaaugugcagguuuguuacauauguauacaugcgccauguuggugugcugcacccuuuaacu

SEQ ID NO: 394350 - RNA, 76 nt, Homo sapiens
uacuguuaauggauagauuuauuuuuaggguccuuauucuguugccuugaccuauggaucuguuuuuauggcagua

SEQ ID NO: 394351 - RNA, 70 nt, Homo sapiens
aagcaguaaaggcacacacuccuuguuauauuccugggagaugaaaggaauacugugccuccugacucuu

SEQ ID NO: 394352 - RNA, 80 nt, Homo sapiens
gaguccuaugauuugucuuggaugaggauuaacagguuguagucuauuugaauaauauguucaggaggaaugaaggacuu

SEQ ID NO: 394353 - RNA, 70 nt, Homo sapiens
ggagauuggcauugcugcaccugagaaagcuuccaacacuuguggacucaugugcaaaaguccaaauucu

SEQ ID NO: 394354 - RNA, 81 nt, Homo sapiens
ggagcauaggaugcacuguguguauuagcucauuuguauuuuucccacuucaaugagcuggucuacguguguaugagcucu

SEQ ID NO: 394355 - RNA, 73 nt, Homo sapiens
uuguuccacaaauauuucuugagcaccugguauuugcccagcacugugcuaggugcuaggaagauaggaauaa

SEQ ID NO: 394356 - RNA, 66 nt, Homo sapiens
cagauuaugcaacgguaugggacaaggccaacaagccauguguccugaagcuuuguuauguaucug

SEQ ID NO: 394357 - RNA, 66 nt, Homo sapiens
augucuaacauuuuugucuaagaaacuugcacuugugucucugcauucuaaguaaauguuggacau

SEQ ID NO: 394358 - RNA, 85 nt, Homo sapiens
uucuccuuauauguguaucuaaaguagucaaacucuuagaaauuaaaaauagaauggugguugccagaugcuggugugaggggga

SEQ ID NO: 394359 - RNA, 80 nt, Homo sapiens
cacccuccugacuuccuugguugauccugugcagaagucgauagcuuaucuccacgcagcaaccagaaagugagauggug

SEQ ID NO: 394360 - RNA, 60 nt, Homo sapiens
agacccaucugugugcuguauucaggagacccaucucaugugcagacacacauauaggcu

SEQ ID NO: 394361 - RNA, 57 nt, Homo sapiens
ucuucaugguccacugacugaggacaaucaaccccuucacagccuaggaccugaaga

SEQ ID NO: 394362 - RNA, 75 nt, Homo sapiens
ggacuuuaggggccuccagauucaggugaugggaacccuggguucccgaggacaucugggggcaaacuuggaucc

SEQ ID NO: 394363 - RNA, 59 nt, Homo sapiens
uuuauuuggugaucaggcagcccuggguucaaauccuggcucuguugcuaccaauuaag

SEQ ID NO: 394364 - RNA, 78 nt, Homo sapiens
uuucugaaagcucuuuuaucagacaugugacuaugguuuuugccgaguagcacaaugugugugauugaaugucagagg

SEQ ID NO: 394365 - RNA, 104 nt, Homo sapiens
uugaggcaggagaauugcuugaacccaggagguggaggcuguagugagccaagaucgcaccauggcacuccagccugggcaacaagagcaaaacuccaucucaa

SEQ ID NO: 394366 - RNA, 99 nt, Homo sapiens
gaaaaauaauguucaguauuucuucaucauauuugaucauggaaccccuuagucauguaucagauaccuguugggaaaugcuguugaaaguuauucuuu

SEQ ID NO: 394367 - RNA, 64 nt, Homo sapiens
agauggaauucucuguagaguuucucaguccacuuuuaacaauggaugagaacagacuccauuu

SEQ ID NO: 394368 - RNA, 119 nt, Homo sapiens
ucuuggcuccuugaucugugcugaggugauauauacauauuuuaaacuuaaucuucaaacuaauccucauagguagguaagguauuauuaucucuuuuuuccagauuaaagaucuaagg

SEQ ID NO: 394369 - RNA, 86 nt, Homo sapiens
ggagguacaggaaggcaagaugagagcccgggcagugacugcugagggucacugauagcuccucuuucaucuucacuuccugcucc

SEQ ID NO: 394370 - RNA, 72 nt, Homo sapiens
cucuauuggacagcacauaucuagaacauuuucaucauugcagaaaguucuguugauagugcugaacaagag

SEQ ID NO: 394371 - RNA, 79 nt, Homo sapiens
cagaguacaauauauaaugauaaugagcauuguuaggaguauagauagaggugcuuguguuaauauguagcuacuucug

SEQ ID NO: 394372 - RNA, 99 nt, Homo sapiens
ccaccagcaaugaaugagaguuccuguugcuccacauccuugccagcauuuguuguugucaguggucuggaugcagccauucucauagguguguugugg

SEQ ID NO: 394373 - RNA, 84 nt, Homo sapiens
gauguuuuauaaaucucugagguuaaauuuuauaguuucuaacagcugaaagcuuagaauuuuggcuucaucauuguagacauc

SEQ ID NO: 394374 - RNA, 65 nt, Homo sapiens
aagcuggcauucaugagauuacuggaaaugaucuacacacaaaggaauuugauaaaugcuagcuu

SEQ ID NO: 394375 - RNA, 76 nt, Homo sapiens
gugucuucuaagugacuagacuaugaaaccucuaacacucucaucagaguuaauucagagcuagucacuaaagcac

SEQ ID NO: 394376 - RNA, 129 nt, Homo sapiens
gauauuucauuaauaucauaguguguaaacacugugucuaaacacuggauaugauaaauauuagagcaagaugucauuaauaucccaguguguaaacacugugucuaaacacugaauauuauaaauauc

SEQ ID NO: 394377 - RNA, 62 nt, Homo sapiens
uuuuggcuuuuccucagcaagcuugcccuuagugacaggauugcagaagagagaagcuagaa

SEQ ID NO: 394378 - RNA, 113 nt, Homo sapiens
ugaccuugaacuugagcacuguugaaaucucaugaugccuaugcaggguuguggucaucaggauuggcaagauagcauaugaggaacucagcaaagcagcugguucacuguca

SEQ ID NO: 394379 - RNA, 81 nt, Homo sapiens
gcugacuuuucauguucugucugguucuaagauucccaucuccgggauuucauugguagcucauggaaccgaaaagauagu

SEQ ID NO: 394380 - RNA, 60 nt, Homo sapiens
ggccugggagaagcacccagccucacgccugcggcaugcgcugccuggguuucccuggcc

SEQ ID NO: 394381 - RNA, 81 nt, Homo sapiens
gccugagauacauacuucuuuacauuccauagcuuagcagguccauaugggcauauaaagaaguauguuucccaagcaggc

SEQ ID NO: 394382 - RNA, 68 nt, Homo sapiens
uugcuugagccuggaaggcagagguugcagugaaccgagauugcgccauugcauuccagccugggcaa

SEQ ID NO: 394383 - RNA, 97 nt, Homo sapiens
gcuuguuggagagcgagaugucaagaccucacauagaggagagacuggccuucucucuauauagugauuuuggugugcuguaaucucagguguaggc

SEQ ID NO: 394384 - RNA, 64 nt, Homo sapiens
auugugaauagugcugcaauaaacauacgugugcaugugucuuuacagcagcaugauuuauaau

SEQ ID NO: 394385 - RNA, 65 nt, Homo sapiens
aguucgcacaggcacagacacugggaugaugagggguaccaucccacugucuucucgugcucgcu

SEQ ID NO: 394386 - RNA, 60 nt, Homo sapiens
uuggaaauauguuaagugucauguugggaauaaccacgagaauaugaaacauauauccag

SEQ ID NO: 394387 - RNA, 86 nt, Homo sapiens
gacagggaugcuguuuggagcuucuggcaugcccccauaggugaaucacaauggaggccuacagaauuuuggagcaaggcccuguc

SEQ ID NO: 394388 - RNA, 77 nt, Homo sapiens
augguagcaaagcugagaugagaaucaguucuaauuuuaaauugagagcucuuuucauuauacuacgcugcugcuau

SEQ ID NO: 394389 - RNA, 77 nt, Homo sapiens
ccugcuguugaugguguccuguuuccccaggauggaugacauccagcucugcaaggacaucauggacuugaagcagg

SEQ ID NO: 394390 - RNA, 56 nt, Homo sapiens
acaaggggagacgcugguaggcagccucaaaaauggugcccagugaucccuuuugu

SEQ ID NO: 394391 - RNA, 72 nt, Homo sapiens
aaaugugucccagagauauugugucuuuguucucauugguuucaaagaacaucuuuauuucugccuucauuu

SEQ ID NO: 394392 - RNA, 64 nt, Homo sapiens
auugugaaugaugucgcaauaaacauacgugugcauguguuuuuauaacagcaugauuuauaau

SEQ ID NO: 394393 - RNA, 82 nt, Homo sapiens
gugcagcuagacuguaagauccaggagagcaagaacuuugucagccucgcucucugugcaucuucaguuucuacaacagcac

SEQ ID NO: 394394 - RNA, 64 nt, Homo sapiens
auugugaauagugcugcagcaaacauacaugugcgugugucuguauagcagcaugauuuauagu

SEQ ID NO: 394395 - RNA, 63 nt, Homo sapiens
uagguacuugagauucugaacuguggagauuuugaaacauuguuuuuauuucaacgugcacua

SEQ ID NO: 394396 - RNA, 85 nt, Homo sapiens
ugaugccucccacauuuugaggacuagaccagugauuccuaaccauucuuuuuucauuggucccucugaaaauugggugaaauca

SEQ ID NO: 394397 - RNA, 84 nt, Homo sapiens
gucauauucucugaccacuguagccacuuaagauagucucaaauaugaauaauuuucaguggccauaguggagaagaugcugac

SEQ ID NO: 394398 - RNA, 67 nt, Homo sapiens
guuuugguuauauggaucaguucuuuaaugcugauuucugagauucugaugcacccauaaccagagc

SEQ ID NO: 394399 - RNA, 130 nt, Homo sapiens
uggguuuaaaucccaccucuucuuauaauaucuucaaagugacaaaguugcagcaucuacugcauaggaaccaauaaugauaauguggcaacuuugucauuuuguaaaugaggguacugauacacaccua

SEQ ID NO: 394400 - RNA, 101 nt, Homo sapiens
caguggcucacaccuguaaucucaacacuuugggaggcugaggugggagacugcuugagccugggagguagagguugcagucagcugagaugacacuacug

SEQ ID NO: 394401 - RNA, 62 nt, Homo sapiens
aguguuaguaaaaaccuagucaaggaggccauuauuuuugacaggucuaauuuacugacacu

SEQ ID NO: 394402 - RNA, 60 nt, Homo sapiens
cugugccauguuguuuaaaucagagaacuggaagauacuuuauuugaucaucaggcacag

SEQ ID NO: 394403 - RNA, 60 nt, Homo sapiens
gagcuaggcuagggggagucgcugauucugcuuuucucugugguccccugagucuggcuu

SEQ ID NO: 394404 - RNA, 71 nt, Homo sapiens
guauagcacauaauacuugaugaggaaaauaaaugauuauacuacugguuuagguauuuacuaugcuguac

SEQ ID NO: 394405 - RNA, 69 nt, Homo sapiens
guucugagcaaagaagugauaaugaauggacaaguuucaaagaaucauuuuggcugcugugcuaagaac

SEQ ID NO: 394406 - RNA, 67 nt, Homo sapiens
acuaugcgcuaagaaggcagcacuggaaggcaaauacugauugaguuguugcauucuuggugugagu

SEQ ID NO: 394407 - RNA, 69 nt, Homo sapiens
guguuuaauauguccuugaaauggugcuucuacuuggagcaccagaggcaaggucauagcagccaacau

SEQ ID NO: 394408 - RNA, 59 nt, Homo sapiens
gagugguuuugauuuauagcuggacauauuaaauguauaaguuaugcuagaagccacuc

SEQ ID NO: 394409 - RNA, 65 nt, Homo sapiens
cccugggaauuugaagaccuucugugggacuauuccugcugcuuuaaggcuuucgaguuccaggg

SEQ ID NO: 394410 - RNA, 76 nt, Homo sapiens
ggagaucuuguuaaaauguggguucugauucagucggucuagggugaggccugaaacugcauuucuaacaagcuuc

SEQ ID NO: 394411 - RNA, 57 nt, Homo sapiens
ugagauguaaucucgcucugucacgagacuggagugcaguggcgcgaucucaucuca

SEQ ID NO: 394412 - RNA, 75 nt, Homo sapiens
auaauuuggggaagauucugucuauaucaauaucucuauaaguauugcuauagcuauaucaucuccuagaauugu

SEQ ID NO: 394413 - RNA, 73 nt, Homo sapiens
aaaggcauugcuuguuuaaagcaguuuaaaugauaguaucuuuuaaggcuuuaaguaaacacagcuggccuuu

SEQ ID NO: 394414 - RNA, 126 nt, Homo sapiens
auguaaagcacgaguaaauagaaaugguuuacaggcuguaaaguaagagguaaguuaaguauucaauuuuaaguuggcuucguuacuuuaaaugugaacucccuucaccuuuccuaugcuugauau

SEQ ID NO: 394415 - RNA, 93 nt, Homo sapiens
cagaaacccaguuuucagucauucacauggaggugauaguugaaguuguauaugcuucagcauucaugcuucaugaagaugcugaaguuucug

SEQ ID NO: 394416 - RNA, 67 nt, Homo sapiens
gaauguucaguagucaaaagauaagggucauagggguuuugaugucuugucaaucuauuuaacauuc

SEQ ID NO: 394417 - RNA, 64 nt, Homo sapiens
ugguaaguaauugugguuucugccauugaaagucauggcagaaaccacaguuacuuuugcacca

SEQ ID NO: 394418 - RNA, 94 nt, Homo sapiens
uuucuuauagauuagaugcuauucgaccagguuuaugccauggucucugacaaaccacauaaaucuuguugaauagcaccuaacguauaagaaa

SEQ ID NO: 394419 - RNA, 86 nt, Homo sapiens
gaucaacuggaauguccauuugcauaauaagauuagggugggguaaccagccuucccugugcauuauguagacgucauaccugauu

SEQ ID NO: 394420 - RNA, 89 nt, Homo sapiens
cuugugucauucgauuuuauggccccuacaugugcaaaauucacagcuauuguugccaggaagaggccacaucgaguagauugaccagg

SEQ ID NO: 394421 - RNA, 58 nt, Homo sapiens
uuucuuuggauaaaguuuuaugcaccaugcuuggguugcagaagcagauccaaagaag

SEQ ID NO: 394422 - RNA, 59 nt, Homo sapiens
uauuagguugguggaaaaguaauugaagguuuugccauuacuuuugcaccaaccuagua

SEQ ID NO: 394423 - RNA, 97 nt, Homo sapiens
uuuuguacauugauuuuguauccugaaacuuuacugaagucauuuaucaguuccaggaguccuuugguggagucuuuaggguuuucuauguauagaa

SEQ ID NO: 394424 - RNA, 59 nt, Homo sapiens
auagagcucaucuguauaggaaagcuguuucagugacuucccguacugguguugccuau

SEQ ID NO: 394425 - RNA, 95 nt, Homo sapiens
aguuaaggcuauuuucauuucuuuuguggaucuucaguugcuucaggccaucuggauguauacaugcaggucacagggaauaugauggcuuagcu

SEQ ID NO: 394426 - RNA, 86 nt, Homo sapiens
cgauggcacagguaagggggcuggggccccacgagcucaccggggugucuccgggugcgucggcgcccuggcccuggucgccgucg

SEQ ID NO: 394427 - RNA, 88 nt, Homo sapiens
ggagacuugcuugaacccaguggguggagguugcagugagccgagaucgugccauugcacuccagccugggugacagagcgagacucc

SEQ ID NO: 394428 - RNA, 99 nt, Homo sapiens
gaccuuggagcccuccugcugaggagugagaaauugguuuccucugccuuucugugucauggaagccacccuccuuccagccccagaggaucuucuguc

SEQ ID NO: 394429 - RNA, 59 nt, Homo sapiens
ugcuugguaaaucuucacuaagacugaguaguaaauuugcucugaagaauuagagagca

SEQ ID NO: 394430 - RNA, 56 nt, Homo sapiens
cgccuauuacuuuuuuuccaauuucaauuaggaacauggaaguaagaauauaggug

SEQ ID NO: 394431 - RNA, 119 nt, Homo sapiens
ccucuguggaaaugaguaaugcugccuuaccuacuuaccacaugucaucuuguauccuuguuaagaguagggcccauggaaguaaucaugagguagcacauaccauauuaccacugagg

SEQ ID NO: 394432 - RNA, 69 nt, Homo sapiens
cuauugccaaagauuuaacuguuaacuauuugggaauccuguaguuaacaguuaauucuuuggcaauag

SEQ ID NO: 394433 - RNA, 89 nt, Homo sapiens
ggaguuucacucuuguugccuaggcuggagugcaguggcacgaucuuggcucacugcaaccuccgccucuuggguucaagugauucucc

SEQ ID NO: 394434 - RNA, 55 nt, Homo sapiens
caggagauuaaacauugcaaauaagucuauuugcaggauguucaguaauuuccug

SEQ ID NO: 394435 - RNA, 76 nt, Homo sapiens
uauacuuuaaguuuuaggguacauguguacaauaugcagguuuguugcauauguauacaugugccaugcuggugug

SEQ ID NO: 394436 - RNA, 95 nt, Homo sapiens
agugcuugucuauuuacugcuuguuauguuggucaguaaugugugacgugcuucauuaauauuauuugucuaaaauaaucccagagauaaguauu

SEQ ID NO: 394437 - RNA, 89 nt, Homo sapiens
gagguaacacuguagcugagggcaugcguucaggaguuaaucugcccaauucaaauucuggcuugacagccuucuagcugcaugaccuc

SEQ ID NO: 394438 - RNA, 85 nt, Homo sapiens
cuuaaggugucuacuaguacugucugguuaccugacaguacugcagcugucagguaugcaacagaaugcaacugaauuccuuggg

SEQ ID NO: 394439 - RNA, 61 nt, Homo sapiens
cugaagcauggacuauggugaugauuauuuuaaguaacaaagcuagggaauccaucuucag

SEQ ID NO: 394440 - RNA, 98 nt, Homo sapiens
aagaagacagagcuaguaaguauuaggugugagauucaaacauuauuguuccagcuccagaguccauacucuuaaucucuacucuguauugucuuuuu

SEQ ID NO: 394441 - RNA, 68 nt, Homo sapiens
ucugagucaucacaaaugaugccuuuuuaagugcuuccaucuucgcuggcaucgcuuugcugaccaga

SEQ ID NO: 394442 - RNA, 56 nt, Homo sapiens
uugagauggaguuucacucuuguuguccagacuggagugcaauggcgccaucucag

SEQ ID NO: 394443 - RNA, 64 nt, Homo sapiens
acauugguuucaugucaugaacuuagaucuugggaucugaaauuucggcaauaugaaccaaugu

SEQ ID NO: 394444 - RNA, 56 nt, Homo sapiens
uugagauuggagucucgcucugucguccaagcuggaguguauuggcacgaucucag

SEQ ID NO: 394445 - RNA, 93 nt, Homo sapiens
ucugcuccucuccuuuguaauuuauauggaauuguugcucagaaaggcaguuaucugaaguaccauuagauuaggaugacaaggaagagcaga

SEQ ID NO: 394446 - RNA, 73 nt, Homo sapiens
gggaauucuuaugcacuguuguugugaauguaaacuauuucagccacuguggaaagcaguguggagauuucuc

SEQ ID NO: 394447 - RNA, 95 nt, Homo sapiens
uguguauaauauacugguccagugcaaggacauuuagguuguuuucauugaaacagaacugcaauaaauguccuuugcgucugucuuuguauaca

SEQ ID NO: 394448 - RNA, 89 nt, Homo sapiens
ggaguuucgcucuugucaccgagguuggagugcaguggugcaaucucggcucacugcaaccuccgccuccuggguucaagcaauucucc

SEQ ID NO: 394449 - RNA, 78 nt, Homo sapiens
uauuaauaaauuaucuaguaaugaaaaaugugagaggaaccauacucuuacaucaggcuugugaugauuacuuugaua

SEQ ID NO: 394450 - RNA, 69 nt, Homo sapiens
aucuaagcaaguucggucacaugcccaccacugaaccaaucacuguggcuuugauugacuuauuuaggu

SEQ ID NO: 394451 - RNA, 129 nt, Homo sapiens
ugcauugguuuuguuuuucauuuauuagguuggugcaagagugacugcaguuuuugccaugaagagcagugacaaaaaccgcaguuacuuuugcacuaaccuaauaaaaagucauacaguuuuauugca

SEQ ID NO: 394452 - RNA, 72 nt, Homo sapiens
acugacagaauugaagguagaaguucucaauucaacaauaagaguuggagacaccuauacuucacucuuagu

SEQ ID NO: 394453 - RNA, 82 nt, Homo sapiens
aguuuuaggguacaugugcacaaugugcagguuuguuacauauguauacaugugucauguugguguacugcacccauuaacu

SEQ ID NO: 394454 - RNA, 63 nt, Homo sapiens
ucauggagcuauguuuuuaaaacuggggcaagugcuucaaaagaaaggagcauagugcuauga

SEQ ID NO: 394455 - RNA, 55 nt, Homo sapiens
uuuucuuuccauacauauugcuaucacuucggugaugguaauguaagagaggaga

SEQ ID NO: 394456 - RNA, 78 nt, Homo sapiens
ugauccuacugugugaaucaauugaucuaugugucugaucuuucacagaaccauacugucuugauuauuguaguauua

SEQ ID NO: 394457 - RNA, 122 nt, Homo sapiens
ugaggucuguaauuucuuuaauaguuuuguucugguguugggucuugcuuuuagucauugugcuaugguuagguaagauguuaacagcugagauaacugggugaagaauauucagaaacuua

SEQ ID NO: 394458 - RNA, 65 nt, Homo sapiens
uacacuggacauccuuguaucuguccuuuuguacaccugcacagguacacagaauauccagagug

SEQ ID NO: 394459 - RNA, 64 nt, Homo sapiens
uguguugcauaauaagagggauacguucuaagaaaugcgucuuugucauugugcaaacaucaca

SEQ ID NO: 394460 - RNA, 80 nt, Homo sapiens
guucagcugaugaagaacgggaaacaaauugcuuaauuuuaagaaauggcaaauguuuucuguugaaauguuuacugaac

SEQ ID NO: 394461 - RNA, 75 nt, Homo sapiens
ucuugguuaucucuuuucauguguaaaugagguucuagguugaacaguauugguaucugagacagaguuucaaga

SEQ ID NO: 394462 - RNA, 120 nt, Homo sapiens
gauugagacagguguauguauucagucuguaucauguuuauguguaggauauguuugcuucaaaauauuuccuugcaacuuaggcauguuuauucauuguuuauucuuacugcaucaauc

SEQ ID NO: 394463 - RNA, 97 nt, Homo sapiens
gggccauguuggcaauaguugaucugugugauuggaugcauuuucaaagaguuuguuaauggugccuuucugcauagacaguguuccacaaucgccu

SEQ ID NO: 394464 - RNA, 59 nt, Homo sapiens
ugagauggaguuucgcccuuguuguccagacuggagugcaauggcgagaucuccgcuca

SEQ ID NO: 394465 - RNA, 83 nt, Homo sapiens
ugggccccuuguuccagcugggggcaacucugcagggccauccuagcugcagagcugccuguggcugcugcaucauucgccua

SEQ ID NO: 394466 - RNA, 96 nt, Homo sapiens
uuuuauuuuaaggagaaugggucauauuuuccacuuuaucaguggcauuauauuguuugauaagaaaaauauaccagacuuccauaauauuuaaga

SEQ ID NO: 394467 - RNA, 64 nt, Homo sapiens
ggucugagagaguacuugauauaauuuagaucuucuuaaauuuguugagacuuguuuuauggcc

SEQ ID NO: 394468 - RNA, 83 nt, Homo sapiens
uugcagaaacuuauauuggacugugcuaguuagaaaggcuggccuccuuucuaacuagcaugguguaauagaacuuucugcaa

SEQ ID NO: 394469 - RNA, 80 nt, Homo sapiens
uugcuugaacucggaagcggagguugcagugagcggagaucgugccacugcacuccagcuccagggugguaauagagcaa

SEQ ID NO: 394470 - RNA, 113 nt, Homo sapiens
uuugcacauugauuuuuuuauccugagacuuuauugaauuugcuuauuagcuuaggaagcuuuugagcugagacaauaaguuuuucuagauacaggaaaaugccaccugcaaa

SEQ ID NO: 394471 - RNA, 73 nt, Homo sapiens
cagauuuagaccugugguuucagaaaaauuuuuggagcaaauuuaaacauguuuggcacuauagguaaauuug

SEQ ID NO: 394472 - RNA, 90 nt, Homo sapiens
cauaaacaaaccacucuagcuccuuugaguagcuucugugaauacuuuccaaaaugcagacuuaaagcagcugcagagaggauguuaaug

SEQ ID NO: 394473 - RNA, 74 nt, Homo sapiens
ucuggugauugcauguugggagcaaaugaagguaaugguaaauggcuuuuaucuacucucaacuuccucccaga

SEQ ID NO: 394474 - RNA, 60 nt, Homo sapiens
uacaugucauguaauuauaacuuuacuuugaacuaggguuuuuauuuauguggcauugua

SEQ ID NO: 394475 - RNA, 65 nt, Homo sapiens
gcuucagacccugcagcugggcugugucuaugugauauggccugcguccagugguaugguuuggc

SEQ ID NO: 394476 - RNA, 122 nt, Homo sapiens
uccuggcgcuuccagguugcucaguucaacagccauugucuuaaauuauuuucagaauagccacaaauuugaauggaauguuggaacuauugcgaacuguccuuaagaagauguucccaggg

SEQ ID NO: 394477 - RNA, 118 nt, Homo sapiens
ccugccccuguucucccccauuccccuagagcuacagcccucacugucccgugaggggaaaaggcauggugacaaugggggcuguagcccuaggagaacgggggagaagaugggcagg

SEQ ID NO: 394478 - RNA, 105 nt, Homo sapiens
ggcuuagcuguuuuaagccacccucucuccauugcucuaaucagguugggauggguuuuuccugagacgaauggagugaacauggcgcuaggacagcugucgguc

SEQ ID NO: 394479 - RNA, 68 nt, Homo sapiens
ucagagguugcguucacuugagugucaaaguguguaccaagacaaauucauucagugaauucuuuuga

SEQ ID NO: 394480 - RNA, 75 nt, Homo sapiens
caugccacuguggacaaagacagaugcgaucguguguguguggggacugcguauauguuuuugucagugugugug

SEQ ID NO: 394481 - RNA, 57 nt, Homo sapiens
gcccaggauuggaggcuguggugaauugagauugcaucacaguacuccagccugggc

SEQ ID NO: 394482 - RNA, 78 nt, Homo sapiens
uuuccacauuacaguguuuugguauuccacauuagaaaguuuucuuguuugugguuaaaacaauugauaaccugggag

SEQ ID NO: 394483 - RNA, 60 nt, Homo sapiens
cuuuauucaggaccauuguuaauagguacagaaccauugcaaugaggucuugcaguaagg

SEQ ID NO: 394484 - RNA, 81 nt, Homo sapiens
gcggggcuguggacuagagggugggcgagguggccuggcugugcccucaccagcccauguuuuacucccauugugccuugc

SEQ ID NO: 394485 - RNA, 58 nt, Homo sapiens
ugagacggagucucacucuguugcccaggcuggagugcaauggcgugaucuccgcuca

SEQ ID NO: 394486 - RNA, 101 nt, Homo sapiens
aaaaugaaacuggaguuuuguaguguggaaauugccacugguucagagucuuuugcuuuuggcuuuuccaggcauuacgauuuggcaccaacuuuuauuuu

SEQ ID NO: 394487 - RNA, 86 nt, Homo sapiens
uuuuaauauggccuggauauuagauguuauuagggaauucuuuuucauuaucuuaggugugaucauuguauugggguuauuuagga

SEQ ID NO: 394488 - RNA, 69 nt, Homo sapiens
ucuuaguuuccuuauuuacaaaaggguuauauuaaugucuacccuuuagguuggaugaggauuuuaaga

SEQ ID NO: 394489 - RNA, 59 nt, Homo sapiens
cccaggaggcggagguugcagugagccgaggucgcaccauugcgcuccagccuccuggg

SEQ ID NO: 394490 - RNA, 127 nt, Homo sapiens
uaccuuuucauuuucuuuuuggcaacauuuuacuuuccagacguggauuagucgcuaucaaaauuuuauuccuaaaauguuuggaaaguggaaauagcuguggaaacugugaauagucaguaaggua

SEQ ID NO: 394491 - RNA, 93 nt, Homo sapiens
auagaagaaaggcuuucaguucuucccgauuaugauauuagcugugagucuaucauacauggcuuuuauuauguugagguaucuuucuucuau

SEQ ID NO: 394492 - RNA, 81 nt, Homo sapiens
guuacccguaugucaauaagaaaauuguggcuuaugcauucaaauguaugcacuguuuucuugaugagauauauacguaau

SEQ ID NO: 394493 - RNA, 62 nt, Homo sapiens
aaguucagaagguuucuguuaacugggaggcaaguuaaggguaacagcacugucugaagcuu

SEQ ID NO: 394494 - RNA, 77 nt, Homo sapiens
gucaguaaagaaguaacuuguuuaggcaaagcacguuauggcuuuuucuugccuaguuuaggucugugcuuaaugac

SEQ ID NO: 394495 - RNA, 82 nt, Homo sapiens
gguuauaucacagcaaggacccauuauucuaacacaauaguaagaagacaaaauggugguucauuguuauggugcccaaacc

SEQ ID NO: 394496 - RNA, 64 nt, Homo sapiens
uucaguuugccaguauuuuauugagaauuuuugcauugauguucacaagaaauauuggccugaa

SEQ ID NO: 394497 - RNA, 80 nt, Homo sapiens
cgauguucggggcccauuaguuguuuguugugaagagacuuucugugcauuguaacaacuaaacauuucuccagacauug

SEQ ID NO: 394498 - RNA, 86 nt, Homo sapiens
ucugaauuggcuuuugaaagucugcgagaggcugggcaccauggcucacaccuguaauccuagcacuuugggaggccaaggccaga

SEQ ID NO: 394499 - RNA, 76 nt, Homo sapiens
gagucucuguugccuaggcuggagugcaguggugugaucuugguucacugcaacaccuccuggguucaagugauuc

SEQ ID NO: 394500 - RNA, 60 nt, Homo sapiens
ggcagaaauguguggcuuauuuauaacuaguuuuggaaguuacaaugagacauuucugcu

SEQ ID NO: 394501 - RNA, 94 nt, Homo sapiens
caaugcgggcccuuuuuuguuccauaugaacuuuaaaauaguuuuuuccaauucugugaagaaagucauugguagcuugaugggguuggcauug

SEQ ID NO: 394502 - RNA, 110 nt, Homo sapiens
uauauauauacaguguguguguauacauaguuguauguauacauauuuuauauauaugguguguguauacauagaauuguguauauauuuuuacauaguguguauauaua

SEQ ID NO: 394503 - RNA, 62 nt, Homo sapiens
ucauagucuaagguucuuuugcauaugagaaaauacagucucuaagagaaucauagacuuga

SEQ ID NO: 394504 - RNA, 91 nt, Homo sapiens
gauaggauagaugguucugaguggcuuucaacacugacuacuauucucuuuuagccagcagugaguagcuuacucagaauuguccccuauc

SEQ ID NO: 394505 - RNA, 84 nt, Homo sapiens
agcuuguguguaaacaggaaauaucaguguaaaacagaaaauaaaauauguaauuaaugcuguggucugguuuaaauacaaguu

SEQ ID NO: 394506 - RNA, 92 nt, Homo sapiens
gcaggagaauugcuggaaccugggagguggaggcugcagugagccgagaucacuccauugcacuccagcccaggugacaacagugagacugc

SEQ ID NO: 394507 - RNA, 56 nt, Homo sapiens
ggguaugugcccuuaaugacaugcacaaagucacuuuugcauaggguuacauacuc

SEQ ID NO: 394508 - RNA, 57 nt, Homo sapiens
gguugcagugaggugcagugauuggccagccuggaucacaugcacaucucuggaacc

SEQ ID NO: 394509 - RNA, 101 nt, Homo sapiens
guagggcuuuaggaaugggguugugucacugugggaauagcagucaccaccacaauaugcucacagugacacgaacccccacaaaauccuccugucccuac

SEQ ID NO: 394510 - RNA, 57 nt, Homo sapiens
agucauuauguuuugggcgauuuguuaugcagcaauagagaacugaaacaugugacu

SEQ ID NO: 394511 - RNA, 73 nt, Homo sapiens
uucucagguauagauaaaucugugugauauggauguuuaagaauaaauaucacagcauugucuauaauaagaa

SEQ ID NO: 394512 - RNA, 117 nt, Homo sapiens
ugagguuuugagcccguucaaaagcuuuuaaauauauagagguuaaguuacuugauuggacugaaucaucagguguguuugaaaaguucucucaagcuuuagcugguucacauuuca

SEQ ID NO: 394513 - RNA, 73 nt, Homo sapiens
uucagcuguuguugggguauaggaaugcuaguaauuuuuguauauugauuuuguauccugcaacuuggcugaa

SEQ ID NO: 394514 - RNA, 76 nt, Homo sapiens
guccccgacguuuggcuugaugaaacauuuucuugauauuuuucaacaguuaucagcgugcaaaucuuuggaggac

SEQ ID NO: 394515 - RNA, 76 nt, Homo sapiens
guccucugauagaucugggcaaaguaaaucaaaaacuuucuggaaaagauuuaccauuuuagaugcuauuaaggac

SEQ ID NO: 394516 - RNA, 76 nt, Homo sapiens
uuuucacuuuguuuuuggauaaguuccuuuaaaaggugucagccuuacccagcugucgcaaaaaggaagauggaaa

SEQ ID NO: 394517 - RNA, 75 nt, Homo sapiens
ggaucuuggguugacuauuguugguguauaggaaugcuagugauuuuugcacauugauuugguauccugagauuu

SEQ ID NO: 394518 - RNA, 76 nt, Homo sapiens
uguguaaaugagugcugaaggagcugugaaauucugaauaauacucauuugucuuugcuccucagcacuuaauaca

SEQ ID NO: 394519 - RNA, 73 nt, Homo sapiens
agggaaaaaugacaagaugacuucaguggaaccucuggauccaccuguacuuaagucacuuuguugggucucu

SEQ ID NO: 394520 - RNA, 55 nt, Homo sapiens
uugagauggagucuuguucucucacccaggcuggagugcaauggcuugaucucaa

SEQ ID NO: 394521 - RNA, 102 nt, Homo sapiens
uuuguugauaaauuuuugguggcguagccuguaucaggacucaaguguuaaccuucaucaucaccggcagacuugaauaggcucaugcuuaucaucagcaaa

SEQ ID NO: 394522 - RNA, 57 nt, Homo sapiens
gggggugguucuaaguccuauauggucacugcaugaggcuaagaugacuccaccccc

SEQ ID NO: 394523 - RNA, 65 nt, Homo sapiens
cucuggauguaaaugaaacuacagucacaggugugggucuguuuuagcuuucuuuauauucagag

SEQ ID NO: 394524 - RNA, 68 nt, Homo sapiens
gcuacauucucguagugcuaguuccaggaagaugccuaugugccccugauagcacuacagaguuuagc

SEQ ID NO: 394525 - RNA, 62 nt, Homo sapiens
ucccuccuucuuuagucggucucaauuauuccaaagaauccuugaguugaagcaaggaggga

SEQ ID NO: 394526 - RNA, 93 nt, Homo sapiens
gagaacccauuugauauauauauauaaucguguauugauauaaaucuauugauacagguuguguuugugauuagauauuaacuuacuguucuu

SEQ ID NO: 394527 - RNA, 79 nt, Homo sapiens
guagagugcugggcacuggcucaugacaagugacacuuccucuccucaccuuuuugaugccaguucauugcacuuuugc

SEQ ID NO: 394528 - RNA, 90 nt, Homo sapiens
gccacaccuacguauuugcauauugucucugguugcuuuuguaccacugcagcagaggugaguacuugcaacagagacuguauguguggc

SEQ ID NO: 394529 - RNA, 63 nt, Homo sapiens
cagugaaacgcucuugcacuggaucauguguccguacauauucacuuuacagagcugucauug

SEQ ID NO: 394530 - RNA, 58 nt, Homo sapiens
ugaugcuuggcuuccaaucccagacacugauuuuguaugagaugugaccagggcauca

SEQ ID NO: 394531 - RNA, 63 nt, Homo sapiens
uuuuuuaguuagcugggcaugauggcucauacccacagccugcagucccagcuacuuaggagg

SEQ ID NO: 394532 - RNA, 79 nt, Homo sapiens
acuugguaccuuuuaaugacuaauuaauauaguggacucauuaaauagguggacauuaauaggguacuuaauguggagu

SEQ ID NO: 394533 - RNA, 88 nt, Homo sapiens
cagaaagggugcggccuggcugacagcuuaauuccagcuuuacgaaacccugaguagagaauucagcuaaggugagcccagauuucug

SEQ ID NO: 394534 - RNA, 123 nt, Homo sapiens
uuagugccagaauggucugggugauacuagggggauguagaagagcuaauauuauucuucacaagguuauugguacuacacuucuaaucuuccauuuuuacaacagaugcuggauguuacuga

SEQ ID NO: 394535 - RNA, 71 nt, Homo sapiens
gggguuucaccauguuggccaggcuagucacggacuccugaccucaggugguccgccugccuuggccuccc

SEQ ID NO: 394536 - RNA, 67 nt, Homo sapiens
acauauuugucacuauguggcuaauauaugccaagccuguguuagucagucauuagggauacaaugu

SEQ ID NO: 394537 - RNA, 80 nt, Homo sapiens
aauacaguacauaaaaugcuuuugaucuuggaaaaguuucuuauaaagguacuucauucucuggaucagaauacugaguu

SEQ ID NO: 394538 - RNA, 75 nt, Homo sapiens
uaaucaagcuuucaagaaugcagcucucaucugauuagaccccauaagaaugaguucauuuugaaaccuugauug

SEQ ID NO: 394539 - RNA, 72 nt, Homo sapiens
aggaaugcuuuuacauuguuagugggaguauaaauuaguugaaccauuguggaagacaguguggcaauuccu

SEQ ID NO: 394540 - RNA, 68 nt, Homo sapiens
aaaagaacuugauauucugagaagcugaagaacaauuuguuuuccucagcuagguauuuaggacuuuu

SEQ ID NO: 394541 - RNA, 69 nt, Homo sapiens
aggaaacauggcaggugcacuggcuuugaaguugccguggugguugcaauccugcaucugucuguuccu

SEQ ID NO: 394542 - RNA, 78 nt, Homo sapiens
agcaaugauggcuuucaggacguggcgagccuggcgucucuuccauugucuuccucuccacuuuuggccauuucuguu

SEQ ID NO: 394543 - RNA, 84 nt, Homo sapiens
guuagauucucauaaggagcaugcagccuagaucccuugcaugcacaguuuacaauaggguuugugcuccugugagaaucuaau

SEQ ID NO: 394544 - RNA, 68 nt, Homo sapiens
aacuugaaaacagcuagcaugcguaacuuucuuuuccccaaaagagaguagaguguaguugaaaaguu

SEQ ID NO: 394545 - RNA, 66 nt, Homo sapiens
ugccuagaaacacuauuucuccuucauuucugaaguauaaauuuucuggguguaguauucuaggua

SEQ ID NO: 394546 - RNA, 102 nt, Homo sapiens
ugggacacuuguuacaauggagauuccaaguuccuuuuccuggagaauccgauuccuugaaagaggccuaggaaucuguauuuuuaacucauaacuguccca

SEQ ID NO: 394547 - RNA, 60 nt, Homo sapiens
gucacaggaaacuaauaugcgcugucuuggaguggagggagcagauuuguucugugugac

SEQ ID NO: 394548 - RNA, 72 nt, Homo sapiens
uuuauuucugccagucuaugcuaaugugaaugaauucccuaucuguauuagugucuuuugguuagaaguaaa

SEQ ID NO: 394549 - RNA, 84 nt, Homo sapiens
uaaacuaauuuuacugugcuuuacuguguugccuuuauuguuaaugaaugguaaagaaaagcacuguauuuaaaauuggcuuua

SEQ ID NO: 394550 - RNA, 114 nt, Homo sapiens
uuuguaugacucuucuguggucugugcauuuucuuuuagacuugguuaaucuuugggcauugguuuaugagaagugcaugaaagagcauccaggagaacacuucgucaaauaaa

SEQ ID NO: 394551 - RNA, 67 nt, Homo sapiens
uccaagaacuuagucuguuugaggacauggaaauuuuaauucauugcucuuacagagugaguaugga

SEQ ID NO: 394552 - RNA, 124 nt, Homo sapiens
gacauccaugccguuuucccuuuucagggcuugauuuuacagaggagcaggcugaggcugggccaucccagugcacugcccgcuuccugucaaggugucuucugcccuggaggccaccuguguc

SEQ ID NO: 394553 - RNA, 62 nt, Homo sapiens
gcuugugacacuggagcuggcacaauuuuggaggagaauguaguauuaccuaguucacaggc

SEQ ID NO: 394554 - RNA, 110 nt, Homo sapiens
cccuuuguggcaaauugagacgggggaaaacuauuagguuggggcgaaaguaauuucuguuucugccauuacuuuugccccaaccuaauaccucccagcaaaaugcaggg

SEQ ID NO: 394555 - RNA, 77 nt, Homo sapiens
uugcuugaaccuggaaggcggagguugcagugagcugagaucgcgccauugcacuccagccuaggugaaaagagcga

SEQ ID NO: 394556 - RNA, 70 nt, Homo sapiens
ucugaagugaaaugucaccuuuuaggacuaggccacgccaguccaacauuugcuguuucauucauucaga

SEQ ID NO: 394557 - RNA, 116 nt, Homo sapiens
cccacccccaaccccugaguaaagugcucugguaucuuggagagagaagugagacaaguuccuucucccucucaggugcaucaacacagcagaauauucuuaguuuguaaaguggg

SEQ ID NO: 394558 - RNA, 68 nt, Homo sapiens
gcaggcagaagaauguggaaaggcuagauugguuuugucuucuggccuacaucauuuuuccgugcugc

SEQ ID NO: 394559 - RNA, 77 nt, Homo sapiens
ucgcuugaacccgggagcuggagguugcagugagccaagauugugcuauugcacuccagccuuggcaacaagaguga

SEQ ID NO: 394560 - RNA, 89 nt, Homo sapiens
aacacgcaugaguuuguuuggauauuaggcaagaguacauucuuguguauuuaugauagaaucuuaaacagaucuuaauuaugccuguu

SEQ ID NO: 394561 - RNA, 69 nt, Homo sapiens
agaaacaugagauuauguaaagagaccaaauuuauggcuguuugguuugacacauaaucaucagauucu

SEQ ID NO: 394562 - RNA, 62 nt, Homo sapiens
uaggacacaggacauauguagagauuaaauagaguagguggugcugugugccuguaguccua

SEQ ID NO: 394563 - RNA, 65 nt, Homo sapiens
guccugagcuuguuuuccugcaacuagauggucccaucuggggugaugggaggcagggacagaac

SEQ ID NO: 394564 - RNA, 66 nt, Homo sapiens
aagucuuaaggcuguaggcaggguuugguaacuuguaucaggcacucagcuuagagucuggggcuu

SEQ ID NO: 394565 - RNA, 71 nt, Homo sapiens
ucaaguagcagaacauguuccuuguaaaugcuaaaccauaacagcuauagaucaugugucugcccuuuuga

SEQ ID NO: 394566 - RNA, 60 nt, Homo sapiens
cuagacacugacguuccuccgagaguagaggcguggcucucaggggcaggaugugucugg

SEQ ID NO: 394567 - RNA, 108 nt, Homo sapiens
uucuguaaauggugauuggguucccagaccuaucuauaaaagugaauccagcccacaguguauucacuuuuauagacaggucugggaacccgaucaccacguauagaa

SEQ ID NO: 394568 - RNA, 77 nt, Homo sapiens
gggcaaaagggcacuguagguccugccucccucucaccccaaguuacagggauaggcagcccugccaggcccagccu

SEQ ID NO: 394569 - RNA, 59 nt, Homo sapiens
uguuaucucugauuauugcauuucauuaguuuauuagugagauggaccaugagaaaaca

SEQ ID NO: 394570 - RNA, 80 nt, Homo sapiens
gagaugaggcaauugaggaugagauggaaaggcucaggauuagccuggggcuuuuucuuguauucucuucuccuuaucuc

SEQ ID NO: 394571 - RNA, 74 nt, Homo sapiens
uaauuaugguuucauuaugaugcaccauaucagggcuguuguaaugucaugucugcacauaguaaaaauaguua

SEQ ID NO: 394572 - RNA, 83 nt, Homo sapiens
caucaaugacaacaugaaaagugucacagagcaugccaagcucucguuuuucaucuuuggauacuugauauaguggaaugaug

SEQ ID NO: 394573 - RNA, 57 nt, Homo sapiens
gacuuaaucaucauuuaaaggcccaaccuguaaagcuaucacauuggugauuaaguu

SEQ ID NO: 394574 - RNA, 104 nt, Homo sapiens
ccaaguggugacuccaauugcagaugcuguacuagaugaugugguuucauugcuugagcaagugaacacaucuccugguaccugguaugcagacauucacuugg

SEQ ID NO: 394575 - RNA, 69 nt, Homo sapiens
cacccagucaucuuggguuuuuauggacgcuucaagacaucagcauuccuucucccaggguauagggug

SEQ ID NO: 394576 - RNA, 93 nt, Homo sapiens
ggauggggaaaagagcugagaguuuaugcugaaauggauuuauagaauauuuguaaaucuauuuuuaguguuuguucguuuuuuuaacuguuc

SEQ ID NO: 394577 - RNA, 73 nt, Homo sapiens
ccugagaacugagauaagugauauucuuuucuauuuuguaaauucaaguaguauugauuucuuagauuucggg

SEQ ID NO: 394578 - RNA, 70 nt, Homo sapiens
uaguauggguuggggauuugauuggcauuagucuucacaagggguacaaguaagaaaauugcccaugcua

SEQ ID NO: 394579 - RNA, 102 nt, Homo sapiens
uauuuaucaucaagcuuucccuguagugccuagaucagauacuuaccuguuuagcccuugugauucugaagagguacugcaaggaagucaaaauguaaagua

SEQ ID NO: 394580 - RNA, 64 nt, Homo sapiens
uucuuuaugucaagaacuuuacauagaguaguuuuacuuuauguggagcacuugacacacagaa

SEQ ID NO: 394581 - RNA, 58 nt, Homo sapiens
uguuacguuuacaauacauuucaacauauuauauguugacuguggguacaaugugaua

SEQ ID NO: 394582 - RNA, 63 nt, Homo sapiens
gcuguuuuucugagugaauacauaauauuaauaagaguaaacauuucauacagugagagcagc

SEQ ID NO: 394583 - RNA, 68 nt, Homo sapiens
uucuccggguggcggcgaagggaccgccgcucauccugccugcaucccuccgccgccugccuggagaa

SEQ ID NO: 394584 - RNA, 66 nt, Homo sapiens
cucugcguaauuauuccuaagccaugacauguuuugcuuauguacccuuagagagugaucgaagag

SEQ ID NO: 394585 - RNA, 87 nt, Homo sapiens
uguccuuaucuaugguaugucuuucuuccuguaggauagcauugaagcugaacuuacaagaagaguagacaugauggaacugugaca

SEQ ID NO: 394586 - RNA, 89 nt, Homo sapiens
caggcucccuggucugaauguuuauauuggccaaaagggauguucagaguucuuauuguccaauaggauguuccugcagauggugccug

SEQ ID NO: 394587 - RNA, 77 nt, Homo sapiens
ccagaguaacccuguaggccuaaaguacucaguuuuaagacaaacacuacuucccaugcgggguacuuuccuuaugg

SEQ ID NO: 394588 - RNA, 55 nt, Homo sapiens
caguuuuccucacugucagucccuguaauccacauucugucacugaggaagacug

SEQ ID NO: 394589 - RNA, 73 nt, Homo sapiens
gaugagaauugcauugaauuuguagcuugcuuuuggcaguauggucauuuucacaaugucgauucuacccauc

SEQ ID NO: 394590 - RNA, 63 nt, Homo sapiens
guugccuaggcuggagugcaguggcgcgaucucggcucacugcaaccuccgccucccagguuc

SEQ ID NO: 394591 - RNA, 84 nt, Homo sapiens
caaaacccuucaguggcuccucacugcccugaggagaaacuccaagcuucucagcacagucagggcgccuccuggucagcuuug

SEQ ID NO: 394592 - RNA, 130 nt, Homo sapiens
uuccuuuauaaauuccccagucucagggacguucuuuauagcagugugaaaacggacuaauacaguuaauugguaccaggauuuggauacugcuauaaagauaccugaaaauguggaagugacuuuggaa

SEQ ID NO: 394593 - RNA, 57 nt, Homo sapiens
uugagcccauuucacuuguccagcaggugccgcgggcuggacacccaaugggcuuaa

SEQ ID NO: 394594 - RNA, 127 nt, Homo sapiens
aguucuaguugagugagugugaauaggagugauagaggaaugugggaggaauguguuuccaggucuggcccacaaauccuuccacaaaagauccucacugcucuuuucccuucugcugguagauauu

SEQ ID NO: 394595 - RNA, 85 nt, Homo sapiens
ccagcaugggagaaagaugagguagaagacucagcaaguuggcuuuucccaccuucuuccaucugcuuuauccuagccgagcugg

SEQ ID NO: 394596 - RNA, 71 nt, Homo sapiens
uauugggugauauguugagguuuuggguacaaauuaucccgucacccagguagugagcauagcacccaaua

SEQ ID NO: 394597 - RNA, 61 nt, Homo sapiens
agcuguguucucgaggcgggggagggcucuuggaaggucuccuggcuagaaggacacagcu

SEQ ID NO: 394598 - RNA, 76 nt, Homo sapiens
uaacugaguugaaaguguucacaaugguauuuacauuucaaaaacuauuuguaugagcauuuuaccagcuuuauug

SEQ ID NO: 394599 - RNA, 71 nt, Homo sapiens
uguggguggagggaaggacuggacuaaggcaagggggagcaaaguucaguccauuuccuuggucacucgca

SEQ ID NO: 394600 - RNA, 111 nt, Homo sapiens
acuuauccuacacacacacacacacacacacacacauacacauaugguguauauauguauguguauauauauauguauauguauguguguuuguguguguguaggauaagu

SEQ ID NO: 394601 - RNA, 77 nt, Homo sapiens
ucgcuugaacccgggagguggagguugcagugagccgagauugcgccauugcacuccagcuugggugacaagagcga

SEQ ID NO: 394602 - RNA, 62 nt, Homo sapiens
cucuggugugggugcuaugauauauaaaaguaaauucaauauuuggcauuaugucaccagag

SEQ ID NO: 394603 - RNA, 76 nt, Homo sapiens
gcuuugucauggagaugaacuuggguaaagaaaagaagagugcuauucucaaaguccugucacuuccagauaaagu

SEQ ID NO: 394604 - RNA, 90 nt, Homo sapiens
cuacacagguucccauuuggcuuaguugaccacagucuuguuuucuuccaagaagugagggaaacugguguuuaggaacacuguuaguag

SEQ ID NO: 394605 - RNA, 60 nt, Homo sapiens
cacccuugcauguggaugcccucucauucuguuuggauacugacaucccaugcuggggug

SEQ ID NO: 394606 - RNA, 98 nt, Homo sapiens
gaggcaggagaauugcuugaaaucgggaggcggagguugcagugagccgagaucgcgccauugcacuccagccuggugacaaagcaagacuccgucuc

SEQ ID NO: 394607 - RNA, 76 nt, Homo sapiens
gggugacugggggccuugugggagugucugggggguggccccucccaucacgugcaguggccccacagggaaaccc

SEQ ID NO: 394608 - RNA, 70 nt, Homo sapiens
gggaaugggcaugagggagaucuccagggugaggucaacguccugucuuggauccaucacgccucuuccc

SEQ ID NO: 394609 - RNA, 68 nt, Homo sapiens
ggcaggaguaagccuaagcaaaaggagaaauuuaaagauguaacuagggcauuggacuugcuuuugcc

SEQ ID NO: 394610 - RNA, 73 nt, Homo sapiens
cacuguaauucuuggggcugcucugacaauuaacaaacacaaauguccacguagcaccuuagcauuucuagug

SEQ ID NO: 394611 - RNA, 68 nt, Homo sapiens
uauuuaggcaauauauucaugucucuccuaagagaggugguuucaaagauaugagguauuccugaaua

SEQ ID NO: 394612 - RNA, 57 nt, Homo sapiens
cagguguauaaacucagugacuccaagcggcuacacugagcaauguuuacauacuug

SEQ ID NO: 394613 - RNA, 78 nt, Homo sapiens
cuuggguuuugccauauagauaaccagcuaaugcuucugacuuuucugcauagauuguuuaaguggcacacaucaaag

SEQ ID NO: 394614 - RNA, 106 nt, Homo sapiens
cuggaauguuuggugacugugaugcuuuucucagugaaguuuagaacauguuauugaacauuuuucucuuuccacugagauuucauagacauacagaaauauccag

SEQ ID NO: 394615 - RNA, 112 nt, Homo sapiens
ugaguucccuaaggaagguguaguugacguuauuguccacuuugcacuguguucuuguguguauggggaugagguggggguggauaagagaagucacccaggaaggagcuca

SEQ ID NO: 394616 - RNA, 115 nt, Homo sapiens
uauauguccauacaaacaguuguauacaaacuagcaacauuguucauaauagcugaauucauagcagcauuguucauaauaguugaaaaguaaaagcaacucauuaagauauaua

SEQ ID NO: 394617 - RNA, 125 nt, Homo sapiens
ccaacaauucuuaaauugugguauuaaacuagauaauagugaacuuuuguugguuuacacacacaaaaagaaguaaauggauagaaauguacuguuuucucccauaauuuauuuugaaaccuugg

SEQ ID NO: 394618 - RNA, 66 nt, Homo sapiens
aucaucuccaacaccuguuguuuccugacucuuuaacgaucgccauucuaacuggugugagauggu

SEQ ID NO: 394619 - RNA, 55 nt, Homo sapiens
ucuaaaaccuucuaauugucuacuuacaaggucuagacacuuggaagguuuuaga

SEQ ID NO: 394620 - RNA, 114 nt, Homo sapiens
uugcuauuugcauagucauuucauuggauaguuuaugaaaaauggaagggaaaguauuuucuuacagugccauuuuucacaagacucacuuccugaugagaacaugagaagcag

SEQ ID NO: 394621 - RNA, 60 nt, Homo sapiens
ugugaauagugcugcuaucaacauaggugugcauaugucuuuauggcagaacaauuuaca

SEQ ID NO: 394622 - RNA, 70 nt, Homo sapiens
gagaccuucacaguagccccucccaucauaggccuggaggccuaggagggagaaaugguuuuguggucuc

SEQ ID NO: 394623 - RNA, 118 nt, Homo sapiens
gggacgagucgguuuggcuccccgggccucgguuuccccacccguacaaugguagugaucguccguucuccacugagcaggugggaggccuuggccccggccucgcaccguucguccc

SEQ ID NO: 394624 - RNA, 66 nt, Homo sapiens
gcucacaaagaaauuccugucuucucuuuagguaauccacagaugacuagaaauuauuuagugagc

SEQ ID NO: 394625 - RNA, 96 nt, Homo sapiens
ucugcugggagaauggaucuucccuugcaggaugaucuggacaacacaucacaggguccaucaaaaggguaaaggaaaucuguucuuguauuuaga

SEQ ID NO: 394626 - RNA, 63 nt, Homo sapiens
uauucugaaacuuugucagccguuuaucaguuccaugagccuauuggcagagucuuuagggua

SEQ ID NO: 394627 - RNA, 104 nt, Homo sapiens
gaguauauacugcaugacuccauuuaucugaaauuuuauaauagucuaaacuaaucuaggaugauaggaaucagaaaagugguugucugugaggugugugauuc

SEQ ID NO: 394628 - RNA, 97 nt, Homo sapiens
augugaggacaugagaucugggagggacugaggugaaaugauaugguuaggcuuugugucccuacccaaaucucauguggaauuguaauccccacau

SEQ ID NO: 394629 - RNA, 65 nt, Homo sapiens
uuugagaugcauacucaaauuaaguauauuuauuugaaaugcauauguugagaugcauauucaaa

SEQ ID NO: 394630 - RNA, 55 nt, Homo sapiens
ugagauggagucuugucgccuaggcuggaguguggagcacaguggcgccaucucg

SEQ ID NO: 394631 - RNA, 56 nt, Homo sapiens
cagagauaccaauucucuugaggcuguugaguaucacuagagaauagguaguucug

SEQ ID NO: 394632 - RNA, 66 nt, Homo sapiens
ugugcacaugguagguauugaguaugugaauuauugaacauguacuuuagauaaauuaugugcaca

SEQ ID NO: 394633 - RNA, 66 nt, Homo sapiens
caugugcaaagcacuguucagcaggggagcucaccugagccuugcugucaagggcuuuagcaugug

SEQ ID NO: 394634 - RNA, 88 nt, Homo sapiens
uuuuagauuccuaguuagcauaauuuguagaaaaucaaagcuagacaguagugaugucucucaaauuuguuugacaagaggucuaaaa

SEQ ID NO: 394635 - RNA, 64 nt, Homo sapiens
agagcauguagaauacuuuaggcacuuacaauuuauuuucuuucuaaaguacucugaugccucu

SEQ ID NO: 394636 - RNA, 99 nt, Homo sapiens
auaauacaugcuagaugaacaguuauagguuugauuuuuaaaugauuggcauccaguuacacguaauaguaagccuggcuaucauuuaaugaguguuau

SEQ ID NO: 394637 - RNA, 68 nt, Homo sapiens
cgugugugccaaaucccauaauaaauccuguuauaugagaggauuuauuaugggauuuggcucauaug

SEQ ID NO: 394638 - RNA, 59 nt, Homo sapiens
uuauagcagugcaggaacagacuaacacagugaccaugucuuauugaucacugcuguaa

SEQ ID NO: 394639 - RNA, 56 nt, Homo sapiens
agugaguucuuccuaucucugccuaacagaaugggcaaugcuaugaagagcuaacu

SEQ ID NO: 394640 - RNA, 116 nt, Homo sapiens
uucaguguauauaaaauuuauaaaacaaauacuuuguguuuuuauguaaaauggaauuagauucuaguuucagauaauuuuaaguagcauggguuuuguuuuguuuugcacuugaa

SEQ ID NO: 394641 - RNA, 56 nt, Homo sapiens
ucuucugccugcugcaggaucuagauuccccucucuagaaccuguaguguagaggg

SEQ ID NO: 394642 - RNA, 79 nt, Homo sapiens
uggaauucugugcguuauucuauaaagcuuaguugaauguuuuagcugaguagaaauaaacgcaaacugaguuauucca

SEQ ID NO: 394643 - RNA, 61 nt, Homo sapiens
ucccucuacuccucaaagugaauuccuucccgucuggauaagacuuuggugauuagaggga

SEQ ID NO: 394644 - RNA, 82 nt, Homo sapiens
aguaucuauuuuauguggcuguugugaggauuaaaugggcuaaucuacguaguacccuugaagcagacauagggugaauacu

SEQ ID NO: 394645 - RNA, 57 nt, Homo sapiens
uaggccaguauuuuauugagaauuuuuugcguugauguucaucaggauauuggucua

SEQ ID NO: 394646 - RNA, 99 nt, Homo sapiens
uuuucagugauauauuuuacuggcuuucacugguguuagaguauaacuggcuuucugaaaugacuuagugaaggucuguccugcuguauauccugaaaa

SEQ ID NO: 394647 - RNA, 76 nt, Homo sapiens
gucccauuccaucuugcauuugcuaaaaugcauuuggaaucacauuauuauagauuaugcaagauuggaagacggc

SEQ ID NO: 394648 - RNA, 130 nt, Homo sapiens
ggcuauggcuccagcuauggcuguggcuauggcucugguuauggcuguggcuauggcuccagcuauggcuguggcuauggcucugguuauggcuguggcuauggcuccagcuauggcuguggcuauggcu

SEQ ID NO: 394649 - RNA, 57 nt, Homo sapiens
ugagacggagucucgcacugucgcccagacuggagugcaauggcagaucuccgcuca

SEQ ID NO: 394650 - RNA, 64 nt, Homo sapiens
cuguuggcauugcugcugacccuccaacuuugaacuuagaagcagaggauagcaaugccaacag

SEQ ID NO: 394651 - RNA, 69 nt, Homo sapiens
uuccgggucuggcacagggaaaguacaagauaagcucuggugcaucuuauugugccacaaaauaaggaa

SEQ ID NO: 394652 - RNA, 65 nt, Homo sapiens
guggccuagaaucuaacucgcaugaaaaugucacaaacauucagcggauaguuucuaaaugccac

SEQ ID NO: 394653 - RNA, 64 nt, Homo sapiens
uucgguuugccaguauuuuguugagaauuuuuguaucgaaguucaucaaagauguuggccugaa

SEQ ID NO: 394654 - RNA, 80 nt, Homo sapiens
uauuagcuugagcaacaaauuaauguguauuuaccucuucgaguaguaaaaugcugucaaauuguguucuuaagcagaug

SEQ ID NO: 394655 - RNA, 60 nt, Homo sapiens
agaguuggucucugucacuguuaggcuagauauuugguuucacaguagcuggaucagccu

SEQ ID NO: 394656 - RNA, 56 nt, Homo sapiens
uccuuucucccagguuaguugucaaccugcuggagcucaacccugcagagaaagga

SEQ ID NO: 394657 - RNA, 65 nt, Homo sapiens
acuauggcauuauuuugauagacagcagaucucuaccuaucucuguguauuaaauaauguuaagu

SEQ ID NO: 394658 - RNA, 94 nt, Homo sapiens
auuuucaauucuuuauucucauccucaggacaaugauggaaucauaguaagguuuucacaauguaaaugaggguuggcauggagggaagggaau

SEQ ID NO: 394659 - RNA, 68 nt, Homo sapiens
cucuggguauuugggauggguuuggggggcaaccgccugcaacucaauguaucuccaagaauugagag

SEQ ID NO: 394660 - RNA, 75 nt, Homo sapiens
gucccaugggauuugaagacauuagguaggucccugcuauaagggccuugcaguacauucagcauccucugggac

SEQ ID NO: 394661 - RNA, 68 nt, Homo sapiens
aaaacaugaaauucuagcugaacccgguuaugcugguauauagugggauuauugugauuucauguuuu

SEQ ID NO: 394662 - RNA, 60 nt, Homo sapiens
gaguccccucuaacccaacuuuauuauguauuaauaauaauaaagcugcucagggggcuc

SEQ ID NO: 394663 - RNA, 75 nt, Homo sapiens
gauggagugagugcaagcaggggaaaugauaggcacuuauaaaaucaucggauccccugaaacucacucauuauc

SEQ ID NO: 394664 - RNA, 79 nt, Homo sapiens
cagcugucaacaccucugggccucugguccauucucccuguuaagaaagagaaaauggcaagagccacagaggcggcug

SEQ ID NO: 394665 - RNA, 61 nt, Homo sapiens
gccugcagguggucugggaaucagaggguaauaucuuugguccccacuccccugccaaggc

SEQ ID NO: 394666 - RNA, 84 nt, Homo sapiens
ucucaugcagucauucuccaaaagggagcacuuucuguuugaaagaaaacaaagugccuccuuuuagaguguuacuguuugaga

SEQ ID NO: 394667 - RNA, 59 nt, Homo sapiens
gaaauuuacaacuuucucaugggaagaaagagaaaauccuaugaguuaggggaaauuuc

SEQ ID NO: 394668 - RNA, 57 nt, Homo sapiens
ggagagaaaguaaucauuucuugccuaugggguaauagggaaugcaaauucucaucc

SEQ ID NO: 394669 - RNA, 64 nt, Homo sapiens
aaagaauaguagaccaaagaguguacaacuccauguguuugugcgcaucggggccugcuucuuu

SEQ ID NO: 394670 - RNA, 84 nt, Homo sapiens
gcagucauaaaguucugcguuagggcuaaaguuaugguagaauuucucuuaguauauuuggcucaacaaacuuuaguucgcugc

SEQ ID NO: 394671 - RNA, 103 nt, Homo sapiens
aaguuugagguuuagggguggugagucaugcuggagucauggccugggcugggagaggcaccgccacuccagcagacugcucagaacucugucccuccagcuu

SEQ ID NO: 394672 - RNA, 75 nt, Homo sapiens
cucccgcagcagguccgagacuaagcugucauggcugagacuaugagcacuuguuuugggcacagaauugaggag

SEQ ID NO: 394673 - RNA, 93 nt, Homo sapiens
uguguugauaauuuugugauuucaagaguguuauaugaauagaaucauucaguuuguaaacuuuugagauugacuuaauuuucacucaauaua

SEQ ID NO: 394674 - RNA, 78 nt, Homo sapiens
uuuuugcccugcuuucuauuauauucuuauuuacuuuuaguggaugaugguuuuauuaauaggacccaauggcaaaaa

SEQ ID NO: 394675 - RNA, 76 nt, Homo sapiens
agagggaaauaugucuguuuagucuguaaugaugcauauuuucauacauaaaauaaauaggucaucaaaucucucu

SEQ ID NO: 394676 - RNA, 77 nt, Homo sapiens
uuuuguauaguaguacaaaaguuuuucuacagcccuuuuaauggcugcaugaaaugccuuugugugacuguacuaaa

SEQ ID NO: 394677 - RNA, 79 nt, Homo sapiens
ccagcucagccuuucaaguagguaggaccacaggcgcaugccaccacgccugggugguuuuuguuuguugguugguugg

SEQ ID NO: 394678 - RNA, 93 nt, Homo sapiens
ccagcuggagugcaaggacaugauaucagcucacugcaaccucugcuucccggguucgagcaauugucaugucucagccuccugaguagcugg

SEQ ID NO: 394679 - RNA, 77 nt, Homo sapiens
accuucuuugaagcagaaagauggugaauaugguaauuuuuauggcuuacuaccagcauuucucuuuaaguaaaggu

SEQ ID NO: 394680 - RNA, 59 nt, Homo sapiens
cugacuuccuagccuucugguugaccggcagccccagugaccacagcagggaaugucag

SEQ ID NO: 394681 - RNA, 58 nt, Homo sapiens
ugcugcuguuaucauuuuaccagcaaaccaccugccaugcaaugcauugacagcagca

SEQ ID NO: 394682 - RNA, 116 nt, Homo sapiens
acaaauauuguuuucugguuguaaauaucagauccuaaaugacagaaauucaguaccuagcacaguacucagagagaacugucauuuggccucuggagccagagagagucuguugu

SEQ ID NO: 394683 - RNA, 76 nt, Homo sapiens
ugguaaaaugucauuuaccagaaucccuggcuuccucccucacuuccccagaugucuggucaaaugucauuuacca

SEQ ID NO: 394684 - RNA, 77 nt, Homo sapiens
ugguggugcacaucuguguuccagcuacucaggaggcugaggcaggaggauggcuggagcccagaaguucaaggcca

SEQ ID NO: 394685 - RNA, 74 nt, Homo sapiens
ucacauaggcaagaugagguuuuuauucagcucuaaaaaucaaaugauaaaaguuuccaaucaugccuguguga

SEQ ID NO: 394686 - RNA, 69 nt, Homo sapiens
auuagucaaggccaaaguaauuguuagcaguauuuaaugcaugcaagacaucguauuuuggucacugau

SEQ ID NO: 394687 - RNA, 55 nt, Homo sapiens
uccucagagaugcgaaggcaggccucggagagcgugucgugcaggaucuguggga

SEQ ID NO: 394688 - RNA, 90 nt, Homo sapiens
uauauauuuucaugaccuuaaaauuguucuacacuguuaugauagugagucuauggcuguaaggauaguaaccuguuauggggauacaug

SEQ ID NO: 394689 - RNA, 63 nt, Homo sapiens
uggcaaguuacuggcaaaaucuacaguuacuggcaaaagcugcaguuuuggaaguggcagcca

SEQ ID NO: 394690 - RNA, 74 nt, Homo sapiens
augucggaggaugcacuuugucaguaaguuaggcauucagucuucacugucaacacaaaugcauucugugacau

SEQ ID NO: 394691 - RNA, 58 nt, Homo sapiens
cucuugguaucagccagaauagccaauaugaagauucuggcuuugggaugcucaaggg

SEQ ID NO: 394692 - RNA, 71 nt, Homo sapiens
aguggaagugguauaaguaccuccuuucauugacuagaacaggugugggaagcucuuauaccaacaccauu

SEQ ID NO: 394693 - RNA, 73 nt, Homo sapiens
uuuagguacuuuggagagauucaaguauguaaagcaucaucuaugauguaaaugaauccaccagagaucuaag

SEQ ID NO: 394694 - RNA, 65 nt, Homo sapiens
ucugugcuugucauaugcuuugaauuaacagaccuauuaggaaugaguauuugacaggaaacaga

SEQ ID NO: 394695 - RNA, 70 nt, Homo sapiens
aguguuuugugauauguggauucagcucaaagaauuaaaccuuucuuugauucaguauguuggaaacacu

SEQ ID NO: 394696 - RNA, 55 nt, Homo sapiens
uaacuuugcuuggugacucagagguuuuuacaccccuggaucaucaguaaaguua

SEQ ID NO: 394697 - RNA, 71 nt, Homo sapiens
gagcccugggauuguucuccugcaacuagauguucccaucugguggugaugagagacaguaacaaauccuu

SEQ ID NO: 394698 - RNA, 130 nt, Homo sapiens
cucucaagccuggagcaugcuuugguggaauucagugcaguguuugcauggaaucauaacaaggucuguauuugauuuucagccaauauugacugaagucccacagagcgcucucagaccugaauuaggg

SEQ ID NO: 394699 - RNA, 72 nt, Homo sapiens
auagagaugauaggcuaggccaaggacuuuuuaccucccuaacaucucuuggauccauccugucuucucuau

SEQ ID NO: 394700 - RNA, 69 nt, Homo sapiens
gcuugagcccaggaguugaaggcagugagcuauaaucacucuacuguacuccauccugggugacagagu

SEQ ID NO: 394701 - RNA, 86 nt, Homo sapiens
ggucagagguuugcuugcacagugguuuagagccuggacuggccacucagccaaggcucaaauuuugugucuggcacuuucuggcu

SEQ ID NO: 394702 - RNA, 81 nt, Homo sapiens
gugcuugguuucagucaguaguucauggcauuagauggcuacauaucuaaagcauccagauugcuucugauuacugagcau

SEQ ID NO: 394703 - RNA, 66 nt, Homo sapiens
ucucauucuccauccaguuuugcacccuugcuggagaggaguugcaaucauuuggaggagaagaga

SEQ ID NO: 394704 - RNA, 56 nt, Homo sapiens
gucuguguuccaccuuuacugucaaaaauuaugcuggugagaaaggagacauagac

SEQ ID NO: 394705 - RNA, 64 nt, Homo sapiens
augauugcguauguaaaugcuuauaauaguacccggcaaacaauaagcaagcauuugcaaucau

SEQ ID NO: 394706 - RNA, 86 nt, Homo sapiens
guuguuguaucacugagcuuguguucaaggaacaccuauuuuacuuaguaauggcccuaaaacacaagaguagugaugcuggcaau

SEQ ID NO: 394707 - RNA, 102 nt, Homo sapiens
cagggguuccuuucucuagagagacagugauauuuugggacacccuuucccugguguuugggaaugguuugucucccaugucuucagguacaggauccccug

SEQ ID NO: 394708 - RNA, 59 nt, Homo sapiens
gcaggagcuuccagaugggcaucagggauacuccagucuugucuauggggguucucugc

SEQ ID NO: 394709 - RNA, 74 nt, Homo sapiens
cucugccucucaagaugcugggauuacaggcaugagccacuaugcccauuguaauugguguuuuugaagaagag

SEQ ID NO: 394710 - RNA, 106 nt, Homo sapiens
ggaaaacagcuaaacuaauuuuccccaaaucugaacaugucuagaauggucuaaagguuucucaacccuuggcacuacugacauuguaagauguuuagcugcaucc

SEQ ID NO: 394711 - RNA, 75 nt, Homo sapiens
gccucuggagucagaagugcuggguucaggcugggcgugguggcucacgccuguaaucacagcacuuugggaggc

SEQ ID NO: 394712 - RNA, 58 nt, Homo sapiens
cuggaaagcaaagggugcauugggacacagccuacucauguuccuuuugccuuucuag

SEQ ID NO: 394713 - RNA, 88 nt, Homo sapiens
gggaccaugucuugguauuuuacauauaguugguacuucauaaaugcuuauugauuuuaauuguaucuauagaugucaagaacguucu

SEQ ID NO: 394714 - RNA, 70 nt, Homo sapiens
guaguuguaacaauuaacaguacuaccagccguauaugggagggcucuaguaccauauuguuggcagcac

SEQ ID NO: 394715 - RNA, 63 nt, Homo sapiens
cuauguguccauguguucuuaucauuuagcuccugcuuguaagugagaacaugugguauuugg

SEQ ID NO: 394716 - RNA, 56 nt, Homo sapiens
agcugcauuuuuaacaaguguagaucaucugaaucacacuuaagagaaaugcagcu

SEQ ID NO: 394717 - RNA, 83 nt, Homo sapiens
agagucugucuauugcuuaguguugacccucugcccauggcaaacaccacggaguagacuauuucagcaccaggaaugacuuu

SEQ ID NO: 394718 - RNA, 60 nt, Homo sapiens
gagaaugaugguuuccagcuucaucgaugucccuacaaaggacaugaacucaucauuuuu

SEQ ID NO: 394719 - RNA, 101 nt, Homo sapiens
guguaaauauuugucuuuuggucuuuugcuagccagagagcucuugucagagauauuagcucugcuuucuaagcagaaguuucuguaggcagagacugcac

SEQ ID NO: 394720 - RNA, 95 nt, Homo sapiens
cucagaugucuaccauaaggggcuuucucugaaagagcauacagauuuggguugugugcucauuuagagagaagcaccuuugguaggcaucugag

SEQ ID NO: 394721 - RNA, 79 nt, Homo sapiens
uguccuucagucuaucagacuuguuuauaguuuuauuguuugaaauagagaugauuaacauuuugguagaaugaagacg

SEQ ID NO: 394722 - RNA, 129 nt, Homo sapiens
ucuuccauggcggcgacaagagaaaaugagguagaaguaaaaguggaaacccaggauaaacccuugagauuuaucugggguuuccacuuuuacuucuaccucauuuccucuugcugcugccauguaaga

SEQ ID NO: 394723 - RNA, 109 nt, Homo sapiens
cuggaaaaucccugagauaucagcuucaggcgaggcuuaauccaaggcugagagucugcauuucucuauuucuuggguuugccuugcugcugcaggccuuuuuuuccag

SEQ ID NO: 394724 - RNA, 60 nt, Homo sapiens
ucugguguguagagaaauagccugaaggcacuuugugcuugccuggccucucugcccaga

SEQ ID NO: 394725 - RNA, 92 nt, Homo sapiens
ggcuugcuuguauacauacaugucuucucuccccucagggacccuguguuccuugagagaaaaggccaugccuuauguagcucaggaaugcc

SEQ ID NO: 394726 - RNA, 67 nt, Homo sapiens
uugaggaggcagucuucccauucucagaucuccagcugcgugaugggagaaccacugcugucuucaa

SEQ ID NO: 394727 - RNA, 76 nt, Homo sapiens
uugcauucuugcugacacuuaauuuugucaaaauuuuaauuugaguuuuuuggugguuaugugucaaugacuguag

SEQ ID NO: 394728 - RNA, 63 nt, Homo sapiens
cuggacuucucaucgguuguucuagaugguggaagacuaugcagcaaugucacagggguccgg

SEQ ID NO: 394729 - RNA, 122 nt, Homo sapiens
cugaguggugguuacuggcuugccacugaugagaggcauuuguagaacuccucagaauccacuuggagaccauuuacugccuacuuagccuggcacaccauggccuucucaaauaccaucag

SEQ ID NO: 394730 - RNA, 61 nt, Homo sapiens
ccagcugacaguagguuuacaguuuauaaucuggccuuuguaaaagcauuugucagccugg

SEQ ID NO: 394731 - RNA, 65 nt, Homo sapiens
gugacuaccuggccaaucagagcaccccacauccccugccucggcucagugauugguuuaguuau

SEQ ID NO: 394732 - RNA, 55 nt, Homo sapiens
uuugaaaguaauuugguuggugcaauuacuuuugcgccaaccaaauacuuucaaa

SEQ ID NO: 394733 - RNA, 76 nt, Homo sapiens
cauccagcccugggaugugcugcaugggacggucugcccagggccuuccaaguggggcacgugccaccgcucugug

SEQ ID NO: 394734 - RNA, 78 nt, Homo sapiens
cauccgucuaugucauacagaggaaauguuccucacaugcaugugauaggagauuuucaucuguaaaugcccugggug

SEQ ID NO: 394735 - RNA, 58 nt, Homo sapiens
gugcacaacacgcagguuuguuacauauguauacaugugacauguugguuugcugcac

SEQ ID NO: 394736 - RNA, 67 nt, Homo sapiens
ggaaauuacuuggucaagaucacagagcaagggaagcucugaacugagaucugaaccaggagugucu

SEQ ID NO: 394737 - RNA, 98 nt, Homo sapiens
gaggcaggagacuugcuugaacccaggaggcggagguugcagugagcugagauugagccacugcacuccagccucgugacagagcaagacuccgucuc

SEQ ID NO: 394738 - RNA, 84 nt, Homo sapiens
uccuggauuaaagggaggugauccuaguuauugggguuggaguuuuaauagcuguuuuuaauuccugcuggaagugguccaggg

SEQ ID NO: 394739 - RNA, 71 nt, Homo sapiens
auuuggguagacauguuuuuuaagguuuaugaaaaucucuuuuauucccaguuaaacauguucaucuaagu

SEQ ID NO: 394740 - RNA, 79 nt, Homo sapiens
uuccaacacuauguugguucuguuuauaugcuggauuacauuuauugauuugcacauguugaaccagcaaaaacuggaa

SEQ ID NO: 394741 - RNA, 76 nt, Homo sapiens
ccccagcuuuuugagguauaguguggcuaguggcuaauuuucuuuugacugguugggaaugcuucaggaagggggg

SEQ ID NO: 394742 - RNA, 55 nt, Homo sapiens
aauguucuguauguuuuccccuagaaauuuucuuggggaaucguaauagaauauu

SEQ ID NO: 394743 - RNA, 85 nt, Homo sapiens
uuauucacagcuauuuuaugagcaccuaagauagugccuagcacaugcaagguauugaguaaauguuuauuggguaagugaauaa

SEQ ID NO: 394744 - RNA, 59 nt, Homo sapiens
guucauagaucaaguaauaagacauuuccuaggguguuuaauuguuugauacuaagagc

SEQ ID NO: 394745 - RNA, 119 nt, Homo sapiens
uaauuagcuaauuaauuucaaaauuguguacauguauacaggguuuacuuucuaccacucuacuguagaaagcaaaccucguauacauggucacaauuuugaaauuaauuagcuaauua

SEQ ID NO: 394746 - RNA, 62 nt, Homo sapiens
gagcauccugcagcugcugcuugacgugcucgaugggcgcguaggccgggugcaggaugcuu

SEQ ID NO: 394747 - RNA, 84 nt, Homo sapiens
uucuucugauuggacauuuuuccuuaaagagguaacaugauuuucagaucaaauugucauuuuaaggaugaugccucuggggaa

SEQ ID NO: 394748 - RNA, 57 nt, Homo sapiens
gagcaggauggcacuucugugaagugggcugaugcucacacagugcugucacugcuu

SEQ ID NO: 394749 - RNA, 95 nt, Homo sapiens
ggguacaugugcaguuuuguuaccuggguagauuguaugaugcuaagguuuaggguaugguugaucccaucacccagguacugagcauaguaccc

SEQ ID NO: 394750 - RNA, 89 nt, Homo sapiens
ggagaaccgcuugaacccaggaggcgcaguuugcagugagcccgagauugcuucacuguacuccagccugggugacagagcaagucucc

SEQ ID NO: 394751 - RNA, 79 nt, Homo sapiens
accuguagaaguuggcauucuggccaguuuggaaguuaugccaacccucugugaacuggcuuagugaaacuucccaggu

SEQ ID NO: 394752 - RNA, 78 nt, Homo sapiens
ccuucauuugaucacaguuauaacauccuuuuugccauguaagguaaccagggauuagaacguggucauauuugaggg

SEQ ID NO: 394753 - RNA, 77 nt, Homo sapiens
ugcacacagagagaaagagagaucaugugccucccuugcuuaaaacccuacaccaucuccuuauuucucuugcggca

SEQ ID NO: 394754 - RNA, 117 nt, Homo sapiens
gugugacuaggacgccucugugcauggauuuuaagauugugauguucagcagugugacuaggacgccucugugcauggauuuuaagauugugauguuuagcagugugacuaggacgc

SEQ ID NO: 394755 - RNA, 62 nt, Homo sapiens
aguauuguagcuuucuguagugcaauauucuagcuauugaacugggguuggguugcgauauu

SEQ ID NO: 394756 - RNA, 58 nt, Homo sapiens
aguggugucuuuuuugauuaggagaaacauuucuucuaguuauagaaaaagcauuauu

SEQ ID NO: 394757 - RNA, 56 nt, Homo sapiens
augagggaagcucacguguccaccuggcaauugguaggagcaucugguuuccccau

SEQ ID NO: 394758 - RNA, 73 nt, Homo sapiens
guucugugauuuuaguucaauuccagaagcauauauagccaugaaggaagcuugagcuaugaguuaauaggac

SEQ ID NO: 394759 - RNA, 97 nt, Homo sapiens
aacaaccccucggggugauuauaagcucauuccagccauguccauuauguguggaaucugggucuaugagcuugaauuucaacuucgggcuauuguu

SEQ ID NO: 394760 - RNA, 79 nt, Homo sapiens
uuuauaaugaaaagagguuuaacugacucacagcuccacauggcugaggaggccucacaaaaccuacaaucauggugaa

SEQ ID NO: 394761 - RNA, 70 nt, Homo sapiens
cuugagcccaggagcucgaggcugcagugaacuguguucgcagcacuguacuccagccugggcaacagag

SEQ ID NO: 394762 - RNA, 89 nt, Homo sapiens
caguuucuuugcuggagauguuguagcuuucacuguuaacuugguaagcauucuccuaacaguguauuuacuacuuccuaaaggaauug

SEQ ID NO: 394763 - RNA, 63 nt, Homo sapiens
cucacaguagcaaauguuagaaagaaugugaaguaacuagaauuuucuaccauugcuaguggg

SEQ ID NO: 394764 - RNA, 99 nt, Homo sapiens
gaggcaggagaaucacuugaucccaggagauggagguugcagugaaccgagaucaugcuguugcacuccauccugggcgacagggcaagacuccgucuc

SEQ ID NO: 394765 - RNA, 63 nt, Homo sapiens
cugggcccaucuugagcacacaguuagcacccuaggaucuaacuaugucucaggauguccuag

SEQ ID NO: 394766 - RNA, 61 nt, Homo sapiens
ucaggugagugaauguagacuauuuuucaaauagauggcuuugcaauggcauugaccauga

SEQ ID NO: 394767 - RNA, 78 nt, Homo sapiens
agauuuaaucuuguaacaguuuauugacucgaaacaccuuaaauaaugguuuggggaucuguacuguagcaagaaucu

SEQ ID NO: 394768 - RNA, 72 nt, Homo sapiens
ggggcaccauaaugucuguuugcugagcccggcaggcucuggagccgcuggugagcgcacagacacagcccc

SEQ ID NO: 394769 - RNA, 85 nt, Homo sapiens
auuguuuuauuagguuagugcaaaaguaauuguagucuaauggcaaaaacagaauuacuuuugcaccaaccuaauauaaagcagu

SEQ ID NO: 394770 - RNA, 60 nt, Homo sapiens
gugacuaagauucuuugauaugaauuuaggucauccugaaauauaauaaauuuugguuac

SEQ ID NO: 394771 - RNA, 101 nt, Homo sapiens
cauuccgucaugcauguuuagacuucauggcuuuuuaaaucauguuguagugugguuacaaugaagauaaaagcuagaggaaaacacuccaugcaggaaug

SEQ ID NO: 394772 - RNA, 123 nt, Homo sapiens
gguauguucaucuucaaggaugucaggaugauuuggggaggugcagucccuccugccccugccccuacauuacuggcuuuccucuugcaccugaagcuuuuuccagaucaaaauggaugugcc

SEQ ID NO: 394773 - RNA, 92 nt, Homo sapiens
ggcagguuuuaguagcugcaucagagccugugugcccugaaaagauguuugcaggccucacgggcucugggucuugacggaagauguuugcu

SEQ ID NO: 394774 - RNA, 58 nt, Homo sapiens
uggcuguuguuacuaacaguucccacguaccaaguguugcucucuagugacacaguca

SEQ ID NO: 394775 - RNA, 91 nt, Homo sapiens
gccuuuguuucuucaucugucaugugaggauaacaauagugcccaucuuguagggugguugugagacuuaaaugagaugauggagcugggc

SEQ ID NO: 394776 - RNA, 80 nt, Homo sapiens
cagagcccuuacuguucacucuggagaauauugacuuccauaaggcaauaguccaccaggugaugaaggugguauuuuug

SEQ ID NO: 394777 - RNA, 74 nt, Homo sapiens
uuccagcaaguuggaguuaagcaguaaugaauugcacagacaauucauuuaagaaguuuagcaguugcuaggag

SEQ ID NO: 394778 - RNA, 68 nt, Homo sapiens
ugugaacacaucugguuaguugaugaaacuguuuucacaguacaucuggcuggauagauacaaccaca

SEQ ID NO: 394779 - RNA, 130 nt, Homo sapiens
cauucgugcaauacuguucuaagauuugaaaguccuucguuuaugggcaauuuaagauaaaaauaauagcaccuucuauugccuaugauugagguacuaauauugauuuaaaagaaaagccuuguaaaug

SEQ ID NO: 394780 - RNA, 69 nt, Homo sapiens
uggucagaaugugcuucuggcuguggucauagacgggugugagucagccccaggagacauacuuugcca

SEQ ID NO: 394781 - RNA, 63 nt, Homo sapiens
cugacugaggaucaguucaucaggacccccaccggggacgaguuugugaagaccucagugcgg

SEQ ID NO: 394782 - RNA, 93 nt, Homo sapiens
uucauuccuuuuggcuguuuuugguuguuggguaagaguauaaauaucucuauacugauauuuucaacuagaagccagaaaacugggauugaa

SEQ ID NO: 394783 - RNA, 93 nt, Homo sapiens
caucccuuccgugucauuugccuggagagcuccuacauaucauuaaaccccaacugugaugucccuccuccaggcagcugccgcagacagaug

SEQ ID NO: 394784 - RNA, 61 nt, Homo sapiens
guggcaugaaagcaucugugauuguuagugguguuauaaucacagguacagcuaaugcuac

SEQ ID NO: 394785 - RNA, 100 nt, Homo sapiens
cucugcuuuacauggcuacguuguuugagggcaggaguuggugagaauuaguuuggaaaacugacuucucucauucagacauagcuuuucuggagcagag

SEQ ID NO: 394786 - RNA, 61 nt, Homo sapiens
uggagugaccauucuuugaaguuucauuguccauuucauuuccaggaaugguaauacuuca

SEQ ID NO: 394787 - RNA, 114 nt, Homo sapiens
agagauagcaagccccaacccacagcaucacagcacaggcaugagugucagcaccuucccucugagcuccauccuugcuugcuguaauguugcuauuugaauuauuuguucucu

SEQ ID NO: 394788 - RNA, 72 nt, Homo sapiens
ggugguucgaguguaguaggccauaugaacuucauaugauugguuuuuugugauggcauuacauuuaucauc

SEQ ID NO: 394789 - RNA, 73 nt, Homo sapiens
gggacccgagcuccagcugaugucgaaugcacucucuggagaugacgugugccggcgucagccagcauuuccc

SEQ ID NO: 394790 - RNA, 63 nt, Homo sapiens
ugucaguuucuugagauggaacgcacuccugcugaagaugcugugaccaucuuugagaugaca

SEQ ID NO: 394791 - RNA, 57 nt, Homo sapiens
guagcucuggcucaggauuucccaugaggugguagaugagauguugaucagggcuau

SEQ ID NO: 394792 - RNA, 86 nt, Homo sapiens
cagcugcucaguuucgggcggagacugcacgucguacagaaccaucugcaaacugggaugugagucuucgcuuucucugucagcug

SEQ ID NO: 394793 - RNA, 71 nt, Homo sapiens
uucaaaucagcaaugaccuaagcaaauaacccccagugcccgggauauuuagcuggagucagugcuuugaa

SEQ ID NO: 394794 - RNA, 106 nt, Homo sapiens
ucuuccucaugggguccccuuuuuucuuagcaacauucagcucagguacagaugagaauuauguucaucuagggugaguguggccagaaggcagggcaggggaggg

SEQ ID NO: 394795 - RNA, 60 nt, Homo sapiens
cugccuaaccauuggugaaggaucugccucccacccccaccucccaauguuuccaggcag

SEQ ID NO: 394796 - RNA, 60 nt, Homo sapiens
ccugaagccaugccucggacuggccccguccugggcuuggucccguguucuggcuuuagg

SEQ ID NO: 394797 - RNA, 84 nt, Homo sapiens
uggcuuuggucuuaccaguggugcuguaaacuuuuaacuauuuucugaaguuuacaaaggcaauuugguucauauauuaaguca

SEQ ID NO: 394798 - RNA, 57 nt, Homo sapiens
ggugauuaauacccuguuaacaggaugacagaauugucuugugcaauauuaaccacc

SEQ ID NO: 394799 - RNA, 64 nt, Homo sapiens
gcgguucuuaucucaauguaucagaagacucagaucacaugggagaaugagaguacacccccgc

SEQ ID NO: 394800 - RNA, 56 nt, Homo sapiens
uugagauggaguuuugcucuuguugcccaggcuggaguguaauggcuccaucucgg

SEQ ID NO: 394801 - RNA, 73 nt, Homo sapiens
uuuugccauuucccaguaaacucuaucccuccuccaccugaggacugggaugagaguguguugggcagcagag

SEQ ID NO: 394802 - RNA, 92 nt, Homo sapiens
cuauuuuguuuccuacugugucuucagugccuaggacagugcuuggaauguaugaggcauucaacuaauuauugaagaugcacacagaauag

SEQ ID NO: 394803 - RNA, 60 nt, Homo sapiens
uucacacuagccacucugguaguaaucgguuaggguauuagaaagagugcuggaugugaa

SEQ ID NO: 394804 - RNA, 60 nt, Homo sapiens
uuguagacaccaaagacagcauagcccagagcagcuaugucugugagagugucugagcaa

SEQ ID NO: 394805 - RNA, 67 nt, Homo sapiens
ucacuugaggaugugugauugcacagugauaggaaucgagugcaagucaucuguccuucagauguga

SEQ ID NO: 394806 - RNA, 93 nt, Homo sapiens
ggaggagaaucgcuugaacccggaaggaggacacugcagugagccgaaauuaugccacugcacuccagccugcugacagagcgaaauuccuuc

SEQ ID NO: 394807 - RNA, 56 nt, Homo sapiens
ccccacuuguguuuuaggggaaucaagucguugauucuucaguuacaacaaggggg

SEQ ID NO: 394808 - RNA, 86 nt, Homo sapiens
ggagaaucaccugaauccaggaggagguuacagugagccaagaucgugccauugcacuccagccugggugacaagagugaaacucc

SEQ ID NO: 394809 - RNA, 79 nt, Homo sapiens
guaacaaagggagcugcauaaucuuguggucuguucugagcuccaugcacaggauaaugcagcuccugauacugauugc

SEQ ID NO: 394810 - RNA, 95 nt, Homo sapiens
gcugucauucaaaauaacaggcauaagaacuucuguuuaaaauagcugggcuuuuugacuagagggcuuuuguguagaagauuuaagaugucagc

SEQ ID NO: 394811 - RNA, 94 nt, Homo sapiens
ggcaggagaauugcuugaacccaggggaggagguugcagugagcugagaucgcaccauugcacuccagccuuggggauacagcgagacucuguc

SEQ ID NO: 394812 - RNA, 72 nt, Homo sapiens
gcauccuguauguuuuccugggaaauuacgguauuugauuuagauucaucaggaaacuuaugcagugguugu

SEQ ID NO: 394813 - RNA, 65 nt, Homo sapiens
auaguugaggacauuguuccuaauauaaacccuaagaggggccgggcacagugucuuacaccugu

SEQ ID NO: 394814 - RNA, 130 nt, Homo sapiens
auaucagaaucauguggaggauuuguuaggacagauuguuaggccucacccccagaauuucugauucaguuggucugagguaggcccugagaauaugcauuucuaacaaguucccaagugaugcugauau

SEQ ID NO: 394815 - RNA, 95 nt, Homo sapiens
uuuaucuuguuugagcuacacugauucauuuguucauuuucugucucuuauuuucaguugaacuuuaucggaacagguacucauaacaagaugag

SEQ ID NO: 394816 - RNA, 98 nt, Homo sapiens
gaggcaggagaaucacuugaacccgggaggcguagggugcagugagccaagaucaagccacugcacuccagccugcuggcagaacgagacuccgucuc

SEQ ID NO: 394817 - RNA, 78 nt, Homo sapiens
ugguuuuugucguugguucuguuuauaugcuggauuacguuuauugauuugcauauguugaaccagccuugcauccca

SEQ ID NO: 394818 - RNA, 55 nt, Homo sapiens
uagauuaucuaugaggcuuccaugcuauaacaucagagguaacagagauagucua

SEQ ID NO: 394819 - RNA, 73 nt, Homo sapiens
gaagacaguggucaguugaguccuugccaagccaggcuggcuucgaggaggagugauugaggcgauuguuuuc

SEQ ID NO: 394820 - RNA, 55 nt, Homo sapiens
ucacucagaccuggugauaugccaaagagaaagaggcaucacacauuucugaugg

SEQ ID NO: 394821 - RNA, 107 nt, Homo sapiens
guucuuugaugacuugacuucugacagugcuuggcaugcaguaggaguucuaggaauacguaucaauuucacugcaugaaaaggacagcaggaugcugaggaaggac

SEQ ID NO: 394822 - RNA, 58 nt, Homo sapiens
uuuaauagcagggacuuccgggguagaguguuccaacccuggcuuauucucuauuaaa

SEQ ID NO: 394823 - RNA, 100 nt, Homo sapiens
aagaaugaugauacccaauauugucuagguugaggguacaaggacauacucauggguacucuuuguguaggucaaucuggcaauauggaucaaaauucuu

SEQ ID NO: 394824 - RNA, 59 nt, Homo sapiens
auuagucauugacauugucugcuccugacauccuagggucaacagugucauggcucaau

SEQ ID NO: 394825 - RNA, 63 nt, Homo sapiens
ugaaauguccaguguuccucagaagaaagguacagcuucuucagaggagcuauggaauaucca

SEQ ID NO: 394826 - RNA, 105 nt, Homo sapiens
guugcccuggugggcugccugaaacugcagugggcuuggcaugagugagaguuggauuucuguuguguuaccuacugcgauuugggggcuguuuguuagggcggc

SEQ ID NO: 394827 - RNA, 77 nt, Homo sapiens
guuucuggcauacaguagcuacucaauaacuauuucuggaauaaauaagugaauguuggcuacugaacacuagagac

SEQ ID NO: 394828 - RNA, 81 nt, Homo sapiens
ccuucaguaugcacugagcuaguagcauugugucauggaugcucacugagccugugcagcuaguacaagguaagcugaagg

SEQ ID NO: 394829 - RNA, 84 nt, Homo sapiens
ggaaagcagaagcagucaagcaguuuuacagggcagugcacgcuuuccauguagaugcuauguugucauucauuucuauuuucu

SEQ ID NO: 394830 - RNA, 81 nt, Homo sapiens
gggacuccuggcuuugcaagaaaucagagccuucccaggcauaggggagccuuggagauuucugcaaggagccucaguucu

SEQ ID NO: 394831 - RNA, 67 nt, Homo sapiens
ucaucuuaucccaguaaaaauggcuucuauccaaaagauaggaaauaacaaaugcuggugaggauga

SEQ ID NO: 394832 - RNA, 68 nt, Homo sapiens
ggcuuugccuuaagacuuacuauacaauuacauaacaaguugaauguacuagaaauuaaggcaggguu

SEQ ID NO: 394833 - RNA, 104 nt, Homo sapiens
cugaggcaggagaauugcuugaaaucaggaggcggagguugcagugagcugagaucaugccauugcacuccagcucugggcgacagggcaagacucagucucgg

SEQ ID NO: 394834 - RNA, 129 nt, Homo sapiens
ggguaacacaugcuaaaauaagguguugcaccucagcagugguuggaggguaugaugagggcuucuacuuuauugcuauuauuugaccauuguacaaugagacuugauucauguuaaaguuaugaaccc

SEQ ID NO: 394835 - RNA, 62 nt, Homo sapiens
auuucucagcucauggucucugaugguuaauauuaugugccaauuugacugggcugaggaau

SEQ ID NO: 394836 - RNA, 62 nt, Homo sapiens
uugaaagcuaucagagauuccauaauguaaugaugagcaaucuggacucugaaagcuaucag

SEQ ID NO: 394837 - RNA, 75 nt, Homo sapiens
uagaacacuguuccauagugagcagucaauguaagcagaaaguguacguaauugcugcuguggcucaguaaucua

SEQ ID NO: 394838 - RNA, 66 nt, Homo sapiens
agugagcggucucacaggcaugaugccagcuacaaggggcuggcgagcugaugugggaggaucacu

SEQ ID NO: 394839 - RNA, 63 nt, Homo sapiens
gaaaacaacuaauguugccuuaaguccucuuucuuucaaggaaagcaucauuaguugcuuuuc

SEQ ID NO: 394840 - RNA, 67 nt, Homo sapiens
caaaauuugagauguuccaaugacuauuaucuucuuaacuugauguaguugaaagaacaucuuuuug

SEQ ID NO: 394841 - RNA, 71 nt, Homo sapiens
gucucacuauguuggccaggcuggucucgaacuccuggguuugagcaauccuccugccauguagcugggau

SEQ ID NO: 394842 - RNA, 60 nt, Homo sapiens
guuguacacauaugugggguacaugugauauuuugauacauguuuacaauguguaauaac

SEQ ID NO: 394843 - RNA, 110 nt, Homo sapiens
gaagacuuuaucuuauucaaauauguuuuaugggauuucauuaagugucugaauuaucuggaguacuuacauuuuccauuaagcuaaauugaguacuacagauaaucuuu

SEQ ID NO: 394844 - RNA, 100 nt, Homo sapiens
uuucacagaauauuauacaugcauuugcacgagaguucucuaucagauuuaaaaacuucuuucuccacucuguguguguguguguguguguguuguggag

SEQ ID NO: 394845 - RNA, 101 nt, Homo sapiens
cuaggaacuggaagcaaggaaggugagaauuugucaguguggcuucaucacuaccuauugguggaagacacauaccugauaacuacuuugcuaguucuuag

SEQ ID NO: 394846 - RNA, 79 nt, Homo sapiens
aggcugaagugcaguggcaagaucuuggcucacugaaaccgccaucucccagguucaagcaauucuucugccucagccu

SEQ ID NO: 394847 - RNA, 86 nt, Homo sapiens
accuaguaaccuccuaagaaagagugcauugguggucaggugugguggcucgcauuuguaauuccagcacuuugggaggcugaggu

SEQ ID NO: 394848 - RNA, 68 nt, Homo sapiens
guuccauauuauacaagcuaaaauggaagaucaagucuggucuuucuuguuagguugcauguuggagc

SEQ ID NO: 394849 - RNA, 63 nt, Homo sapiens
ccacugucacaacacucugauggauggugccaaccaaagcguuucauagggugguggcagugg

SEQ ID NO: 394850 - RNA, 71 nt, Homo sapiens
gaccccaugaucucacuucugcguggaauccaaaaaguugaacucauaaaguagaaaguagaguggugguu

SEQ ID NO: 394851 - RNA, 69 nt, Homo sapiens
ugggaauaggcuugguaggcacgaucaguccaggaaauucuuuucagugccuucugagccuagucucca

SEQ ID NO: 394852 - RNA, 55 nt, Homo sapiens
ucccaaacuccugggcuccuaggcugaaagaucacuugaggucaggaguuuggga

SEQ ID NO: 394853 - RNA, 76 nt, Homo sapiens
gucaauggaagacaugcaagcacacaagaggaaauguguacacaucauuucaugcuucugcuugccuucaugugac

SEQ ID NO: 394854 - RNA, 86 nt, Homo sapiens
gaauuucauuugugggaggugcuaauguaaaugguuacaaucaauuuuuguauauuuaucuugcauccugcuaccuugaugaauuc

SEQ ID NO: 394855 - RNA, 67 nt, Homo sapiens
gugaucacagcuugacuaaaggacuuaaauucgugcacaaugagucccagucaguaggcugugacau

SEQ ID NO: 394856 - RNA, 69 nt, Homo sapiens
cgguugauugaaauaucaguuaaagguugccagcaugguugcagauaaacugauguuugaaauucgcug

SEQ ID NO: 394857 - RNA, 86 nt, Homo sapiens
guggaggaagaguacaauagugacaaaucagcaugcaaacauuuuucggcugauuuugcacucuuguccucucaguguuccucuau

SEQ ID NO: 394858 - RNA, 116 nt, Homo sapiens
guauuguauccaacaugcuuguguauguaugucuauuauguagcaggaagguuuuccccgaacaucuauucugcuaucaugcuggaccagguaaacaagcucuuuauaugcaauau

SEQ ID NO: 394859 - RNA, 63 nt, Homo sapiens
caugucuuuuauucugugugaugaaacauucugccuaucuccucacacagaauaaaagaugug

SEQ ID NO: 394860 - RNA, 56 nt, Homo sapiens
ggggaguguggacaucacccugguucugaaugaacuagggguggcugccauucccu

SEQ ID NO: 394861 - RNA, 94 nt, Homo sapiens
uuuauuuucagguaauuaugguuugucuucucaacaccagccaguuucuauauuaggauaaagggagauuaaacuauaauauuuguuuuguaaa

SEQ ID NO: 394862 - RNA, 64 nt, Homo sapiens
uuuggaugugguagugcugaucagggccaugugcugauguccuggagagcaaaaucaauccaaa

SEQ ID NO: 394863 - RNA, 121 nt, Homo sapiens
uacacauacucauggccauccuaguuuuguguccguuuuguuucaggcucagugcauacagaagcaccugagucucaacugggaauugauuuaggaaggagagguuuuggauguuugugua

SEQ ID NO: 394864 - RNA, 67 nt, Homo sapiens
aggcuugauuucaucuuuagaggaaggagaacugaagcuucugaguccaguaaaggugaagaggucu

SEQ ID NO: 394865 - RNA, 97 nt, Homo sapiens
ggcaggagaaucgcuugaaccugggaggcggagguuguggugagccaggauugcgccauugcacuccagccuagguaacaagagugaaacuccagcu

SEQ ID NO: 394866 - RNA, 68 nt, Homo sapiens
aucuauggccuuguauaccuggcaaagaguuugaauuuuguguugagcaguaggaggccacuaaagau

SEQ ID NO: 394867 - RNA, 73 nt, Homo sapiens
cucuggugucucaaauuacgagaaaauauauaaaacauguaauugcuucuguauuuuggacacucauuaggag

SEQ ID NO: 394868 - RNA, 78 nt, Homo sapiens
gaggguacagauaacaguaucuaacgagugaugauugcuguugcugggucauagugggggauuuguuguguguuccuu

SEQ ID NO: 394869 - RNA, 112 nt, Homo sapiens
gccaaggacaugagcaaccacagaccugugcauaugcaugugcaugcacguggaccuucacgccgugugcaugcuuuuguaugucuacaggcuuuuuggagaugugccuggc

SEQ ID NO: 394870 - RNA, 71 nt, Homo sapiens
gcuugaauucaugaggcggauguugcagugagcugagaucaugccauugcacuccagccuggggcacaagc

SEQ ID NO: 394871 - RNA, 86 nt, Homo sapiens
aggcuauuuucacuucuuuuguagaucuucaguugcuacaggccaucuggauguacacgugcaggucacaagggauaugauggcuu

SEQ ID NO: 394872 - RNA, 83 nt, Homo sapiens
ucuuagcucuuuuacugucuucagucccucugcuucaccucuugaguguguagugggauucaggcagauaagagggcgaaagg

SEQ ID NO: 394873 - RNA, 64 nt, Homo sapiens
uucaguuugccaguauuuuacugaggauuuucucaucgauguucaucagggauauuggccugaa

SEQ ID NO: 394874 - RNA, 69 nt, Homo sapiens
gucucuguacaguggguguagggaccagccacacagggucgguggguuuuucuccccgugugcagagau

SEQ ID NO: 394875 - RNA, 89 nt, Homo sapiens
acaauaaugaauauugcuggaaagugaaugugcuggaauagcuucagagagcuuaucuccauauauuuucuuaauuggcacauuauugu

SEQ ID NO: 394876 - RNA, 119 nt, Homo sapiens
gauguaaaagauuaaaaaaugauacacuugugacgggcacuuaccaugaauggaacuugcaggacugaaaguugcuuuagguaagucaauggguacugagugugaagcucuuggacauu

SEQ ID NO: 394877 - RNA, 77 nt, Homo sapiens
cacacuagaagaauuuucauaauguagucacauggugauugugugugauugcauuaugaauauuauuguaguaugug

SEQ ID NO: 394878 - RNA, 62 nt, Homo sapiens
auugugaauagugcugcuaaacauacaugugcauaugucuuuauagcagcaugauuuauaau

SEQ ID NO: 394879 - RNA, 76 nt, Homo sapiens
uccccaccaguagaaucaguggauucugacuucucuccuagauuccagaaggagccugauuuccuagugaaggggg

SEQ ID NO: 394880 - RNA, 76 nt, Homo sapiens
auauugaaggaggugcucacucucggaugcugaugcuacacuugccaacccugagagugagcaucuccuuaaaugu

SEQ ID NO: 394881 - RNA, 130 nt, Homo sapiens
gaucguugcgugagcgugugugggaagcgcguggucacgugagaucguugcgugagcgugugugggaagcgcguggucacgugagaucguugcgugagcgugugugggaagcgcguggucacgugagauc

SEQ ID NO: 394882 - RNA, 103 nt, Homo sapiens
uugagacagagucuugcucuugucgccgaggcuggagugcaguggcgccaucucggcucaaugcaaccuccaccucuggguuccagcaauucuccugccucag

SEQ ID NO: 394883 - RNA, 62 nt, Homo sapiens
gugcuggcauuauagucaugagccacugcgcccggcccauaugucuauucuaaugccagcac

SEQ ID NO: 394884 - RNA, 77 nt, Homo sapiens
agugcauaaaaaucaccuggggaucuuguuuacagauuggaauucacuugugaaguggauccugagguuguugcauu

SEQ ID NO: 394885 - RNA, 70 nt, Homo sapiens
cucgaacacaggaggcggaggcugcagugauccgagaucccgccacugcacuccagccucggugacagag

SEQ ID NO: 394886 - RNA, 75 nt, Homo sapiens
ccugcuacugugccuggcauauauagucaaagcucaauaaacggugguggugguaauacuagucauaguagcagg

SEQ ID NO: 394887 - RNA, 93 nt, Homo sapiens
ccucuugauggaucacaauucucaauuugugaaacacuugucaaaggcaagcuccucauuucauagaugagaaugcugagacccagagagggg

SEQ ID NO: 394888 - RNA, 74 nt, Homo sapiens
gggcucuuugagaucaucuaaucuggccucuucacucuacacugguggagacuaagauucauaggugauugccc

SEQ ID NO: 394889 - RNA, 80 nt, Homo sapiens
gccacucugugucuuucuuauuagaauauuuaauucauuuaaauuuaaguaauuguuaauagggaagcauuugcuguggu

SEQ ID NO: 394890 - RNA, 78 nt, Homo sapiens
guguguccucagcaaguuacuuagcuuggcuagaguuuuaucucugaguuaguguggugcuuggaaugcaggaugcac

SEQ ID NO: 394891 - RNA, 123 nt, Homo sapiens
cuuaucauuaacuguaacuuaguuagcgugauauuuuugauccuuaaguuuuuaacaucguauaaagaauuuuccauccaaaguaacaugaggcagagcuaccugaauuucaguggugauaag

SEQ ID NO: 394892 - RNA, 77 nt, Homo sapiens
aaugcagcuggcaagugucugagguuuuguauuagcccacaaagggcauaauuaucucagacacuuguuuauucauu

SEQ ID NO: 394893 - RNA, 103 nt, Homo sapiens
aggucagcuggucuucagcuugacccuagaauugacucuaggagcagugacccugcugccucccagagccaguuauaggcucaagaucaagaccaacugaccu

SEQ ID NO: 394894 - RNA, 83 nt, Homo sapiens
uauuagguuggagcaaaaguaauugcagauuugccauugaaaguaauggcaagaaccacaguuacuuuugcaccaaccuaaua

SEQ ID NO: 394895 - RNA, 56 nt, Homo sapiens
cccucccacacggacucuaggcuggcccagugucaccaguagaaugugugggaggg

SEQ ID NO: 394896 - RNA, 55 nt, Homo sapiens
cugucuguuuggggaccuguggccaaggggacccuggcccgggacaagcaggcag

SEQ ID NO: 394897 - RNA, 74 nt, Homo sapiens
uuucuuauuuggcuaugaguccuaugugcauugguacucauagccugugcauaaccucacucauagccuugaaa

SEQ ID NO: 394898 - RNA, 108 nt, Homo sapiens
cagcaguguaaagguguucccuuuucacuacaucuaugcuaacaucaauuuuuuuuaauuuuuugauuauggccauucuuguaggaguaaggugguaucucacuguug

SEQ ID NO: 394899 - RNA, 55 nt, Homo sapiens
cagcagguuuuuaucaguuaagcugcuucuaggcaacugguagaaaugucugcug

SEQ ID NO: 394900 - RNA, 59 nt, Homo sapiens
uccagugccagcuguuaaaguuucaucgucucaucgugaaagacacuguccccacugga

SEQ ID NO: 394901 - RNA, 56 nt, Homo sapiens
gucuuguugaaggcuuaaaaaaggucuuaccucccuuuuuuccccuuucuuaagac

SEQ ID NO: 394902 - RNA, 76 nt, Homo sapiens
ccagcaagagagguuacagucuuguguaagguuauaacagaggugaugacccgucauccuggcuguauuuuguugg

SEQ ID NO: 394903 - RNA, 55 nt, Homo sapiens
cauuuacuggauacccaccauguaucagacacugcugguguuugaacagugaaug

SEQ ID NO: 394904 - RNA, 130 nt, Homo sapiens
gccucccaaagugcugggauuacaggcgugagccaccgugcccagcuguuauagcuuaauuuuagaaagaauggcauuuuuagggcugggugcgauggcucaugccuguaauccuagcacucugggaggc

SEQ ID NO: 394905 - RNA, 129 nt, Homo sapiens
uuacauucucuaaauacauauugucuaccugggacuagguuauacucugaaauggugcuauuaauaaaugaaucaaaguuuuaccuuuuaagagauaguagucaagauaggcacagauauacaauguaa

SEQ ID NO: 394906 - RNA, 55 nt, Homo sapiens
gucaggaucuguguucauucugccuugaugagaggcagagcaaagcaguccuggc

SEQ ID NO: 394907 - RNA, 56 nt, Homo sapiens
uuucacuuuucucucugcuacacgcuguggagcuaggcaugaauggaaaagugaga

SEQ ID NO: 394908 - RNA, 55 nt, Homo sapiens
ccugaagauuagaaggagugcaccuucucaaggugccuacuuugcaucugucagg

SEQ ID NO: 394909 - RNA, 56 nt, Homo sapiens
guugguucuguuuacaugcuggauuauguauauugauuugcauauguugaaccagc

SEQ ID NO: 394910 - RNA, 83 nt, Homo sapiens
gcuucuuucacugagaaugauguuucugagguucguccacacugaggcauguaucagaacuucauucuuuuugaugacugagc

SEQ ID NO: 394911 - RNA, 58 nt, Homo sapiens
ggacguagagaaaugugaaauggaguaggcauucacauuccaucacaaaacugcguuu

SEQ ID NO: 394912 - RNA, 72 nt, Homo sapiens
guccaugggaaauaguuauugagauuaauauuauuauuaugcuauugauuaauugugauuaggcagguggac

SEQ ID NO: 394913 - RNA, 99 nt, Homo sapiens
uuccugguaauucggaugcacauuaaaauuaaaguuuuauuuagagcauugguccccuaaguuagguagaaguuuacuuugaaguuugcaagccaggga

SEQ ID NO: 394914 - RNA, 89 nt, Homo sapiens
gaggaaauagaaguugagagaguuuguaauuugcuccaugcuacacaguugguaacuggcauagccagacuucucacucauguuuucuc

SEQ ID NO: 394915 - RNA, 102 nt, Homo sapiens
ccagucuuggguaugucuuuaucaguagcaugaaaacagacuaauacaguaaauugguacuaguagagugggauguugcuggaaagauacccaaaaaucugg

SEQ ID NO: 394916 - RNA, 122 nt, Homo sapiens
cccgcccccaucccgcccgcgcaagguuuuuggcguucacaccuacuagggccgugggcuugugccaagacccacggaaagaggugggaggugggaagugggaggugggcgguggggguggg

SEQ ID NO: 394917 - RNA, 63 nt, Homo sapiens
cuauguguccauguguucucaucauuuagcuccaccugauaagugagaacaugugguauuugg

SEQ ID NO: 394918 - RNA, 78 nt, Homo sapiens
gggacucuucggaggcaugacacaagaugagccuugauaagcgcuugcaccuuaugucuguucucucagaucacuccc

SEQ ID NO: 394919 - RNA, 65 nt, Homo sapiens
uacauauauaagguagaaauagucacaucuguaaugcagugguccugguccccuuuauguaugug

SEQ ID NO: 394920 - RNA, 77 nt, Homo sapiens
agacucaggaaaauauaguaguugucuucaucugaauggcuaucaugaggaagacugaaauugcuguuccucagucu

SEQ ID NO: 394921 - RNA, 93 nt, Homo sapiens
ucuuuuuaucuaacagucuacucacugcauuucaguuuuguucugauuacauuugaaguucuaacaaacaauguaaugaauggaguaagaaga

SEQ ID NO: 394922 - RNA, 63 nt, Homo sapiens
agggccaugucucugaguaggcaaggagaauagaaucuauugcacaugaggagacauuguccu

SEQ ID NO: 394923 - RNA, 70 nt, Homo sapiens
auagcugcucaggcuuuccucauguuuaaugagcacuggucaggaguuuugaggaaagucccucaguuau

SEQ ID NO: 394924 - RNA, 55 nt, Homo sapiens
ugaucuguguauauugaaccagccuugcaucccuggaucaaauuacacuugguca

SEQ ID NO: 394925 - RNA, 87 nt, Homo sapiens
aguuuuaccaaaccauccuuagaguacaggggaaucaaggaugaauuugcccaacuuuguucacuguucuuuacuuggggucagacu

SEQ ID NO: 394926 - RNA, 84 nt, Homo sapiens
gaugaacugauaaaagcuggcuuucauugagugcucacugugugccaggcacugcucgaagccaucuacauauaugaguucauu

SEQ ID NO: 394927 - RNA, 56 nt, Homo sapiens
uuugagauaggaacucacuaugcugcccaggcaggucuugaacuccuggucucaag

SEQ ID NO: 394928 - RNA, 69 nt, Homo sapiens
caugaguugguaagguggaugaugaauaaauggggauuuauuuagcuauuuucuuuaucuuugcuuaug

SEQ ID NO: 394929 - RNA, 77 nt, Homo sapiens
uggucuauggccuguaaacuagagacccuggaaagcuggugacauaguuccaguccaaguuugaaggcccaagacca

SEQ ID NO: 394930 - RNA, 77 nt, Homo sapiens
gggacuguggcgccuucaaaccucagguucuugauguguuuuaggaaucuguagaaggugcacauucaugaggucuu

SEQ ID NO: 394931 - RNA, 60 nt, Homo sapiens
acacaagcagggacucaauggcuguuucuggaaugacaaugaaucccuguuucacagugu

SEQ ID NO: 394932 - RNA, 66 nt, Homo sapiens
ugcacaacuccaaggagugucauucauauugaugucaauuugaauggcucuuccuggaguugugua

SEQ ID NO: 394933 - RNA, 66 nt, Homo sapiens
gccaauuuuuuaaaucucuggaacagguuaaaugcuuccugauuuaugguuuucugggagauuggc

SEQ ID NO: 394934 - RNA, 74 nt, Homo sapiens
cuaugcacacugaguauaacugaccuuaugagaacaucauucucacuaagauuaugaugugcuuucuugugugg

SEQ ID NO: 394935 - RNA, 59 nt, Homo sapiens
auguccauauguugugaucuagaacuccuuuuguuauagcacuuuuuacauauggacau

SEQ ID NO: 394936 - RNA, 59 nt, Homo sapiens
gugguggggcccucuagauccaggggcugguuaagcugaaucagguagggccccauuau

SEQ ID NO: 394937 - RNA, 62 nt, Homo sapiens
uugugaauagugcugcaauaaacauacaugugcaugugucuucauagcagcaugauuuauaa

SEQ ID NO: 394938 - RNA, 81 nt, Homo sapiens
auaaaucaaguaauauaaaugcauugagaacugcugacuuuuuauuagaugguaauuguuucauguauuuucuugauuuau

SEQ ID NO: 394939 - RNA, 107 nt, Homo sapiens
agccagauuauuuauuuaacaauacuuaauuauugcuuacccuguauuagaucucuauagguagugaugaaauaguggugaacaaagaguuaggaugguaucuggcu

SEQ ID NO: 394940 - RNA, 71 nt, Homo sapiens
aacuaauaaggcaaaccuuggcugcaguuagcacacaauuaaagcaacuuaccaaguuuuaccuuaaaguu

SEQ ID NO: 394941 - RNA, 65 nt, Homo sapiens
aauggaaauugauggcuaauaugaaaagaugaaagucugaguucaugaggccauucaaauccauu

SEQ ID NO: 394942 - RNA, 62 nt, Homo sapiens
aacucacggugcaggcuucugggaugugcagaugugauccuagccuuagucacuggugaguu

SEQ ID NO: 394943 - RNA, 75 nt, Homo sapiens
gcuggagggaacacuggcugcucgaguucucccaguaagccuccgagagcuuugaaggcagugcgguccuucagc

SEQ ID NO: 394944 - RNA, 55 nt, Homo sapiens
uuagacaguggugcacugcacuccagccugggcaacagagugagacuuugucuaa

SEQ ID NO: 394945 - RNA, 85 nt, Homo sapiens
gauguuggugucucucugagcuuuuauuuccucaucuguaaauuuuugaugauaauaccugccucagagaguugucauaaagauc

SEQ ID NO: 394946 - RNA, 64 nt, Homo sapiens
ucaagugaucaaagugcuggaauuacaggcgugagccacugugcuggccuuuggugacuucuga

SEQ ID NO: 394947 - RNA, 64 nt, Homo sapiens
acuucucuaggccacagacaucugcacuguauucuagugcugugauauuuuuggccagucaggu

SEQ ID NO: 394948 - RNA, 79 nt, Homo sapiens
aacuugucauuguucacaguacucccuggaauuaaacccccaggguuuuagcugauuccuauugugaguaguuuagguu

SEQ ID NO: 394949 - RNA, 76 nt, Homo sapiens
cugacccagcucaguuauagcauuaguggcagcaggguugcuugugccacuccagcucuagcuuuagguggcucag

SEQ ID NO: 394950 - RNA, 77 nt, Homo sapiens
augugguuuuugucuuugguucuguuuauaugcuggauuacauuuauugauuugcauauguugaaccagccuugcau

SEQ ID NO: 394951 - RNA, 75 nt, Homo sapiens
ucucagcuuccccuuuguaagauggaaacgcaguacuaauaugugcacuguuuaauuucacaaaguugacugaga

SEQ ID NO: 394952 - RNA, 61 nt, Homo sapiens
cagugacacugaaaaguucgggcagccacuuuuagguagccacuuuuagguagugacacug

SEQ ID NO: 394953 - RNA, 91 nt, Homo sapiens
gccgggcacgguggcuccagcccguaaucccagcacuuuggcaggccaaggugggcggauuaugaggucaggaguucgagaccagccuggc

SEQ ID NO: 394954 - RNA, 94 nt, Homo sapiens
gguauacauguuagugggauaauuuuuggugcuguuugggcugugauccaguagacggugcuuaagaguaaucgccaguagccaggcuaauacc

SEQ ID NO: 394955 - RNA, 67 nt, Homo sapiens
uugagcacugucugugugcaguaccucuuggaagugcugaggaacaagagaacaagacaguguucaa

SEQ ID NO: 394956 - RNA, 66 nt, Homo sapiens
ucugucaucgguauuaucaccuauguggcagcgaaguguuccauagucauagugcugaugcucaga

SEQ ID NO: 394957 - RNA, 92 nt, Homo sapiens
agcucccgauaugaaaaagcaugacuugaggaaguucuucagugcaaaagaaggaaucuaagguaucagguuaugcgauuaugcuggcagcu

SEQ ID NO: 394958 - RNA, 56 nt, Homo sapiens
cugcuggucuuuaaggucuaggccaaaagcuaagcaaagacgguaaggcccagcag

SEQ ID NO: 394959 - RNA, 55 nt, Homo sapiens
guuuuuaugccagugucaugcuguuuugguuacacuaugacacugucauaaaaau

SEQ ID NO: 394960 - RNA, 57 nt, Homo sapiens
gagagggugggaccaguuccucucuuuugguuaguccagcugguuguccacucucuc

SEQ ID NO: 394961 - RNA, 64 nt, Homo sapiens
guuuucaucugaaccacaaggcccgccacaguccauggcaagugucugguguuuuaaugaggac

SEQ ID NO: 394962 - RNA, 76 nt, Homo sapiens
gugcacaauacugcauuugucccuuuugaacauguaacagauuaaagagcugggcaggaggcagauguaggggcac

SEQ ID NO: 394963 - RNA, 59 nt, Homo sapiens
guuugugaaccucuggccaagaugagggguuccucaucuccucuagaggcuucagagac

SEQ ID NO: 394964 - RNA, 85 nt, Homo sapiens
ggucagagguuugcacauugcaccuuuuguaugguccaaguuaagaauauacacaaauucaugguuaauggugaauggcuuggcc

SEQ ID NO: 394965 - RNA, 95 nt, Homo sapiens
gcagugaucgugccauugcauugauugugccauugcgcuaaucaauaauauugauuagugacuggcuacacgguguggaggauagugucagaugc

SEQ ID NO: 394966 - RNA, 98 nt, Homo sapiens
gugggguauuuuauguaauucauagucacuuccaauguauaguuaaguuacugcuagcugcacugguauaggagaaauguucguaaaacgcucaccac

SEQ ID NO: 394967 - RNA, 127 nt, Homo sapiens
gaggcugaggcaggagaauugcuugaacccgggagguggagguugcagugagcugagaucgcaccacugcacuccggccucgugacagagcgaggcucugucucaaaaacaaacgaaaaacaaccuu

SEQ ID NO: 394968 - RNA, 88 nt, Homo sapiens
ucagaaucccauguagcuaggauuacagauguccaccuuccaccauacccggcuaauuuuuguauuuuuaguauagaugggguuuuga

SEQ ID NO: 394969 - RNA, 76 nt, Homo sapiens
uugcucuauugcccaggcuggagugcaguagcacaaucuuggcugacuacaaccuccaccucccggguucaagcaa

SEQ ID NO: 394970 - RNA, 78 nt, Homo sapiens
gucacuucauuggauguuacacugugugacugcauuaccgaaaaugacugcacacaucguguagauccaaggauuggc

SEQ ID NO: 394971 - RNA, 60 nt, Homo sapiens
cucagggacaguaucauuuaggagaauauguuuuuauugcccuaaauugcuucaccugag

SEQ ID NO: 394972 - RNA, 69 nt, Homo sapiens
ggagauuauuaguguuucaugccugcuaacauaaauccuuucugcagcucaugaaucagacuaauuucu

SEQ ID NO: 394973 - RNA, 62 nt, Homo sapiens
gugagggaugugaaaaaggucagucuacuguuuuacaauucuuaccuguuggcaucuuucac

SEQ ID NO: 394974 - RNA, 78 nt, Homo sapiens
guaucauugccuaaugcucucaguauggacauccuguuacacuaaaccauaaaaauccugagagcugggcagggauac

SEQ ID NO: 394975 - RNA, 69 nt, Homo sapiens
cucugguguuauucauguaguuuucauugauuuuagggcaauaccauaagcuuuggauaauaccaugag

SEQ ID NO: 394976 - RNA, 100 nt, Homo sapiens
gagacaggagacucgcuuguacccggcaggcggagguugcagugagccaagauugcgccauugcacuccagccucggcaacaagagcgaaacuccgucuc

SEQ ID NO: 394977 - RNA, 129 nt, Homo sapiens
aaauuaucccuuccuuaaauguucgguagaauuuauuaguaaugcuaucugggccagggguuuuguuuguggaacuuuuuuuuagugguauuaauuauacuucuuuauacauauaaggauaucuaguuu

SEQ ID NO: 394978 - RNA, 89 nt, Homo sapiens
gguucaguggcugcaaauggaucugauggagagcguguggcuuugggaggagugugccgccuuccacagugagcagcgaggcugggacc

SEQ ID NO: 394979 - RNA, 83 nt, Homo sapiens
ggcagauugggucaguugauuuguuuuuccuucaugcauuuauuauauauaugacuuuggaaaaauuacuugaucuuucuguc

SEQ ID NO: 394980 - RNA, 78 nt, Homo sapiens
ugcaccuuuucaauuggcagugcucuugccacaugaaucgcucaucugcccaggauguuuugccaaacauaggugaca

SEQ ID NO: 394981 - RNA, 93 nt, Homo sapiens
gccuugcauaauucaagagcuuucaagaggagcuucacaaucuugaguggagauucuuggguuguuggcuucuccugcucuagacuggagggc

SEQ ID NO: 394982 - RNA, 95 nt, Homo sapiens
aaagaaaguuauauauaugaagauuuuuuguaaggaaggcuauaaaggaaagauaaucuuugaugagaaaauacuuuguaggguaaauuuuuuuu

SEQ ID NO: 394983 - RNA, 89 nt, Homo sapiens
ggcuuaguguauuguaugaaaaucggagauuggguauuuuaagccaaaaauauucaacucugauuuuacauacguggauacuacuggcc

SEQ ID NO: 394984 - RNA, 63 nt, Homo sapiens
uuuuuauauuugauuaacaagagccuaaaugcuaacugauuuaggcgaggucagauaaagaaa

SEQ ID NO: 394985 - RNA, 57 nt, Homo sapiens
ugagaugaguugcgcucugucgcccaggcuggagugcaguggcgcgaucucggcuca

SEQ ID NO: 394986 - RNA, 64 nt, Homo sapiens
uucgguuugccaauauuuuacugagaaguuuugcaucaacauucaucagggauauuggccugaa

SEQ ID NO: 394987 - RNA, 59 nt, Homo sapiens
guagagagaaauacaaagcuguauucauagcaggacauggcaggagguauuuucucuac

SEQ ID NO: 394988 - RNA, 68 nt, Homo sapiens
uuccuugaaggcagcagcuguauuuuauuuaucaauguauucccaaugccacugugccugccaaggaa

SEQ ID NO: 394989 - RNA, 101 nt, Homo sapiens
gcccuacuacagacaaaaaucacuguguccuuuguguaucuauaguaguuugaauuuccagauacagugcauagaggcaugauacuuuggucuucuggggc

SEQ ID NO: 394990 - RNA, 62 nt, Homo sapiens
aggccuuggccuuuagguaaagcuuaaagaacucucuuuaguaauuucuguaaggcaggccu

SEQ ID NO: 394991 - RNA, 84 nt, Homo sapiens
aaguacuucaacagucagcccauccacagacccuaccauacagccuucccagaaucucuggaugcacugauuggugaaugacuu

SEQ ID NO: 394992 - RNA, 72 nt, Homo sapiens
gccaagucagauucugcagagaaaaggagcuaggacuuacuuaccucuguggcucucggacuuggacuuggc

SEQ ID NO: 394993 - RNA, 70 nt, Homo sapiens
ggauccaucagucaguucccaucagaguaacaaaaauuguaaacuaaauaugggacuaacugaugggucu

SEQ ID NO: 394994 - RNA, 127 nt, Homo sapiens
ggcacaaagcaaugaagacaugugagcaagcuucuuguucaugugcaugggaaucucaaguguuaccacuucauuuagaugauguuuacugagcaucaggagcaguauaugucagcaccaaugugcc

SEQ ID NO: 394995 - RNA, 99 nt, Homo sapiens
gggcaagauaaagaaauaaaggguauucaaauaggaagucaaauuaucuguuugcagaugacaugauuguauauuuagaaaaccugaucuuaucagccc

SEQ ID NO: 394996 - RNA, 74 nt, Homo sapiens
cagagauaagcagccacuuguccagggacauguggggccaccuggcaucccugucgucaagucucugcccucug

SEQ ID NO: 394997 - RNA, 63 nt, Homo sapiens
uaagaggaauguuaaggcgcuguuggucaaugugaucuguagcccuuuuggcauugaaucuug

SEQ ID NO: 394998 - RNA, 79 nt, Homo sapiens
uuggagauggugacaguaaacagucuugauuauggucuaauaugaccauugagggggaauauuacucuuaccuugccag

SEQ ID NO: 394999 - RNA, 94 nt, Homo sapiens
uuugaaucuaccuuuuggcaagcaggacuaaagcaccugaggacucgaauuagugggguuuuguucaugcugucucuuguaaaagguauuuaga

SEQ ID NO: 395000 - RNA, 66 nt, Homo sapiens
gacgugcauggugggcacaugaagauagucuccuccacugcaucucauggcucacccugcauaguu

SEQ ID NO: 395001 - RNA, 57 nt, Homo sapiens
aggcaagcaucuugcucccuucuuacaaagaaacagaaguggugaaguaacuugccu

SEQ ID NO: 395002 - RNA, 80 nt, Homo sapiens
cucaagcuuggcucuacgcguuuccuugcuuugcugugcuccaggggagucacugagcagaaggaagcgaguugccugag

SEQ ID NO: 395003 - RNA, 86 nt, Homo sapiens
uggugauagauagauuugggacagauccugacuccuuacuuggcucuaaggccuuaggcuaguuucuuaaacucucuggaucacca

SEQ ID NO: 395004 - RNA, 65 nt, Homo sapiens
cuuagcauccauaggagauugguuucaggauccccuauagauaccaaaaucuguggaugcucaag

SEQ ID NO: 395005 - RNA, 68 nt, Homo sapiens
ggguacaggugcacaacaugcagguuuguuacaaauguauacaugugccauguugguaugcugcaccc

SEQ ID NO: 395006 - RNA, 80 nt, Homo sapiens
aucuauagggcaggggcaaaaugccacgagucucuuugcuaaagcagagcaagagucacuuuugcuccaguucccuagau

SEQ ID NO: 395007 - RNA, 73 nt, Homo sapiens
cuucucucuccuuugauaguguccucuuuggcagaaagucauuuuguaaaacccacaauuaaggagugggaag

SEQ ID NO: 395008 - RNA, 83 nt, Homo sapiens
ggugagaaacugaauaucccgcuaugcaaaguacaaacaagcucucugugaaaaugcuuuguuauauggggauucuucucacu

SEQ ID NO: 395009 - RNA, 87 nt, Homo sapiens
cacagaggggaagagcauuggauggggagauuugaguuggaaggucagauccucaaaggucuacucauuggagucuccacaucugug

SEQ ID NO: 395010 - RNA, 84 nt, Homo sapiens
agucagaguuuuggaauaacagugaugauaauaugcaaauaauuccugaacuaucuaucacagugauguuccagagacauggcu

SEQ ID NO: 395011 - RNA, 58 nt, Homo sapiens
gugagauggagucuugcuuuguugcucaggcuggaguacaguggcgauuuccucucac

SEQ ID NO: 395012 - RNA, 90 nt, Homo sapiens
ugcccagcagcaccuuggggugaaugcauuaagaagggggaacugucaucucauucucccucucagauuuauucacagucuccugcggca

SEQ ID NO: 395013 - RNA, 130 nt, Homo sapiens
guugaacaucccugguccaaaaaucugaaaucuaaaauguuccaagaucugaaacuugaguggucaugcucaaaggaaaugcucauuggagcauuuuggauuucagauuuuuggauuagggaugcccaac

SEQ ID NO: 395014 - RNA, 119 nt, Homo sapiens
uuucuucagcuacaacuugaguccuagaguuacaugaggauuuuuauugucuucaaaaggugaccuugagacaucacaaaauccucaaugaaacucucuagauuaaugcuuuggagaaa

SEQ ID NO: 395015 - RNA, 66 nt, Homo sapiens
guguggccuuuguuucaguuggguaccuguuuaacagaaaucuaggcugggcacaguggcucacgc

SEQ ID NO: 395016 - RNA, 65 nt, Homo sapiens
cuaguuuauuugcauagaggugaguauaguauuuugugauagcuuuuucauuucugugacacuag

SEQ ID NO: 395017 - RNA, 95 nt, Homo sapiens
gugugcuggggaugggauggaauuaaaaucagaaucauugucuuuccuuuuuaaauuuugcaguggugcugugggcugauaccuccuucacacau

SEQ ID NO: 395018 - RNA, 75 nt, Homo sapiens
auaggaccuagaauuuaaguggaagcagcgugguagaguacaaauagcuucugacucuggagucucagguucuau

SEQ ID NO: 395019 - RNA, 101 nt, Homo sapiens
cuggaaagguguuggggugcagggaaccucaguuauauaccugcaaaaacagauauguuaagauggaacaugggaacucuucccugcaucucuuccuccag

SEQ ID NO: 395020 - RNA, 57 nt, Homo sapiens
uguugcacugguaauguacugaccuuuugaaaaggugggguauacuccagucuaaca

SEQ ID NO: 395021 - RNA, 63 nt, Homo sapiens
uuuuuguuacaguugccuacuauucuugcacaagggauacuggcuuuccaauugugauaaaga

SEQ ID NO: 395022 - RNA, 71 nt, Homo sapiens
ugaaugucauccaugaucacauaaccaggugcauuccagguauccuaaaaaugucauggaugacuaauuca

SEQ ID NO: 395023 - RNA, 101 nt, Homo sapiens
ucauggaccacauacauuuggacaguuugguaucccucaccaucugaacucaggaacuguacagauucagagagggagggauaccuaaaggugugucauga

SEQ ID NO: 395024 - RNA, 100 nt, Homo sapiens
cugcccaaucucuucucccugcauaguucaccgcugauaccuguuuccccaacuucacuugguagcaaaggaugacuauguaccaggaauugacaugcag

SEQ ID NO: 395025 - RNA, 62 nt, Homo sapiens
cugaauguuucacucugaaaugggaguccuuggaggguuuugagcagaggagagacauucag

SEQ ID NO: 395026 - RNA, 89 nt, Homo sapiens
ggagaagcccuugaacccgggauuugaagguuguggugagcugagaucccaccauugcacuccagccugggcaacaagagcaaaacucc

SEQ ID NO: 395027 - RNA, 62 nt, Homo sapiens
cccugaucuugcccuucagaggguuugaggcugaaccagucccucuuugagggaagaaaggg

SEQ ID NO: 395028 - RNA, 67 nt, Homo sapiens
gugagauuuggguagggacacagauccaaaacauaucauuuugccucuggccccucccaaaucucau

SEQ ID NO: 395029 - RNA, 62 nt, Homo sapiens
caaugguccccauuggcaggaacugaacccuucucuccucuccuuucuccgggggacuguug

SEQ ID NO: 395030 - RNA, 65 nt, Homo sapiens
aaauauuggcacugagcaagaacagggcacugaagaggauucugagcuuucuaguguagauguuu

SEQ ID NO: 395031 - RNA, 66 nt, Homo sapiens
aucugaugguuuuauaagggagaguuucccugcacaaauucucucuugccugcagccauguaagau

SEQ ID NO: 395032 - RNA, 101 nt, Homo sapiens
ggauuuacuucaauuuugaaagaaguucuacugggggcaaaauguuaucaaacaucauugcacccuauagagaaauauuucaugaaaagaggagucgaucu

SEQ ID NO: 395033 - RNA, 58 nt, Homo sapiens
auuuugagucuuuaacauacuguuugggaagcccggggcagcgugguggauugaaaau

SEQ ID NO: 395034 - RNA, 75 nt, Homo sapiens
ucuaugucagacaagguaaacuagggugacagaaaguagaucugugccugagguuaacauuguugguuacauaga

SEQ ID NO: 395035 - RNA, 61 nt, Homo sapiens
ucuucugugauucuucacuagcuucaggccaucuggauguauacgugcagaucacagggga

SEQ ID NO: 395036 - RNA, 65 nt, Homo sapiens
uggccccaugauucaauuaccuuucacugggacccucccaugauacguaggaauuaugggagcua

SEQ ID NO: 395037 - RNA, 76 nt, Homo sapiens
gggaauugagauagaauaggaaugggaugcaacuccuccuucacauauguuuucuucucuuuuuuucucucguccc

SEQ ID NO: 395038 - RNA, 68 nt, Homo sapiens
ggggaauguuaaagaauuugcagaucuauuucuuccuacccucuggcugcaacuuucuuacauuucuc

SEQ ID NO: 395039 - RNA, 123 nt, Homo sapiens
ggcugaggcaggagaaucgcuugaacccuggaggcggagguugcagucagccgagaucguaccacugcacuccagggggcaacagugcaagacuccucaaaaaaaaaaaaaaaaaaauuagcc

SEQ ID NO: 395040 - RNA, 118 nt, Homo sapiens
guuauuagcuauaagucaaaacuugcauagaguuauugcccuuuaagggcaaacuugcauugacuuauucccccgaaggacaguagcuuuaugcagguuuugacuuacaucuaguaac

SEQ ID NO: 395041 - RNA, 56 nt, Homo sapiens
aguuuuugcugauagcaugcuuacgugguaguguagcuuacugggcaguaaagauu

SEQ ID NO: 395042 - RNA, 82 nt, Homo sapiens
gcugaucacgaccccggccgguagucgggaauggcggccuccguggucacccugacaugcggccgaacccucgagacgcggc

SEQ ID NO: 395043 - RNA, 79 nt, Homo sapiens
uuggaccucaauuuuaauuuuguuauagaacucugugagaaaaagcuuauagacacguuguaacaaacacuguggccaa

SEQ ID NO: 395044 - RNA, 62 nt, Homo sapiens
uggggagaaagauguggaugacugccugccagggccccacccaccagcagcccauaucccca

SEQ ID NO: 395045 - RNA, 95 nt, Homo sapiens
gacagaugaugucaucaucuacguggcagaaaagagaagcaauggaaaagcuauuauuuuauuuuauuuugcuucagagauggugucacucuguu

SEQ ID NO: 395046 - RNA, 68 nt, Homo sapiens
gauuccacuuacuuagcauucccgaaaagacaagguuggggaacagggaauggagugggaaugggguc

SEQ ID NO: 395047 - RNA, 59 nt, Homo sapiens
guacauguugacacgggauuguauagguguaguucccuucucuucccugugacaugugc

SEQ ID NO: 395048 - RNA, 97 nt, Homo sapiens
cugcccccaucuuugccaugucauagguuaagccugcucagacuuuaaccuaugaagcaggcuuaaccuaugaaguggcaaagauggccacaagcag

SEQ ID NO: 395049 - RNA, 83 nt, Homo sapiens
aaguuauauguaaggcucuuucaacguaaauuaagcuggauuaagaugaccaaauuagaguaugaagagauugccuuagacuu

SEQ ID NO: 395050 - RNA, 68 nt, Homo sapiens
uguuuuuaaguguggaaaggaucuacucucuugcaugggaauauggcaucuguucuacacauaaagca

SEQ ID NO: 395051 - RNA, 58 nt, Homo sapiens
uaucagauuccacauuuuaucagacucacuuaucuuugccagucugaggggugugaua

SEQ ID NO: 395052 - RNA, 86 nt, Homo sapiens
agugcuuacguauagcagcagcuaguagugauaguacuuuccgugauuucauauuguuacaagugcaugcuguuuaugagggcacu

SEQ ID NO: 395053 - RNA, 58 nt, Homo sapiens
uugcaaggugcagcuuaugcaaggugucuuuuuucuggguaaugagccaaacuugcaa

SEQ ID NO: 395054 - RNA, 66 nt, Homo sapiens
uuaagccuaucugugucucugcacgugagauggguuuccugaaugcagcacacugaugggucuuga

SEQ ID NO: 395055 - RNA, 106 nt, Homo sapiens
agaauugugcugugguuguuauagaucaauuaauuguuacuugggauuugauauucugccuuuccaguacagaauacuugauaauaaaagcauaguacauuauucu

SEQ ID NO: 395056 - RNA, 58 nt, Homo sapiens
cucauuugggagauaauacaugcccacagcacaggguauuguauguaaaccaaaugag

SEQ ID NO: 395057 - RNA, 72 nt, Homo sapiens
gcucuuagccagagaaagggaguuuuggauaaacuaaagacuggaaugaugacuuuuugcugugcugggagc

SEQ ID NO: 395058 - RNA, 77 nt, Homo sapiens
caaguagauuuuuuauauggucaauauuguuuccauuucuaagggcauaauagcugaucauuuagaaguaucacuug

SEQ ID NO: 395059 - RNA, 70 nt, Homo sapiens
agguaccagcagaaucagugucuggugagggcuuccugguucacagucggugacuucuugcugcgugcuu

SEQ ID NO: 395060 - RNA, 85 nt, Homo sapiens
ucccaucucagccccugaguagcuaagacgauaggcauacaccacuaugcccagcuaauuuuaguauucuuuuguagagaugggg

SEQ ID NO: 395061 - RNA, 86 nt, Homo sapiens
uuccauauaguauucuuauaauuacaaaauaaaaccagagagcaacuuagugguuuuguacuugaagaaucuuuauguugauggaa

SEQ ID NO: 395062 - RNA, 129 nt, Homo sapiens
aaacuaacuuuaggcaaaacaacauacagccaaaccacauuuucucaucaacgcuguaaaaaaaugauguugaaugaaaugaugucauuugaggaccugcuauaguugguuugcuuaaaguugcaguuu

SEQ ID NO: 395063 - RNA, 70 nt, Homo sapiens
guggcaaagaugccuucuccaagcacugaaaauuaacugggcauaggcuuggaggggcuguuuugguuac

SEQ ID NO: 395064 - RNA, 96 nt, Homo sapiens
guucagaaucugaaucggcucauaucucucuuauacgucaacuuccacuuuucugcaaguugguguaugagacagaagccuacucagaaucugaau

SEQ ID NO: 395065 - RNA, 81 nt, Homo sapiens
uaugccagauugauuuuggucuuuuguaaguuaucucaggauuuguaggaaguuacagguagaccacaguuauaagguaug

SEQ ID NO: 395066 - RNA, 64 nt, Homo sapiens
ucuccugaaguuuaugaaaacugguugucuuugaggaguggaaugguuuuugaggcacagggga

SEQ ID NO: 395067 - RNA, 67 nt, Homo sapiens
uuugaaaauuaucgggcuuugauuucuguuagcuuuuccugggaagcugucaaagucgguauucaaa

SEQ ID NO: 395068 - RNA, 65 nt, Homo sapiens
ggggaggcugggagccugagugguagugugcuuagggccaugagcuauggagcucccaccuucuc

SEQ ID NO: 395069 - RNA, 55 nt, Homo sapiens
gguccucagaggucuuuacaucuagaucuucuuccgguaacagucucucaggauc

SEQ ID NO: 395070 - RNA, 77 nt, Homo sapiens
cuccugggaugacaugaagaaaaacagauuucuuucaaacagagaagucuuuggugccuuuucugucuccccagugg

SEQ ID NO: 395071 - RNA, 95 nt, Homo sapiens
ggaaacccaguaacauaugggagggaguuuguuuguauacacauucuuuuaaaauauacauugaucaucuuuccuguuguguuagcuuuauuucc

SEQ ID NO: 395072 - RNA, 71 nt, Homo sapiens
ucagcaacauaaacaacauagauucagugauaugguuucuguucauuggacuuguguucuugagggccuga

SEQ ID NO: 395073 - RNA, 72 nt, Homo sapiens
augauccuuauugcuggauguauuacauguugaugucuccagccggacauguaauuccagcacaagcuucau

SEQ ID NO: 395074 - RNA, 62 nt, Homo sapiens
aacacuugaacuuccuguaaucaaugaccuccucucauugaguauagaucaguucaaguguu

SEQ ID NO: 395075 - RNA, 61 nt, Homo sapiens
ggaggugaauggauuuuuaaaaaugugguagaaacacacaauggaaugcuauucaaccuuu

SEQ ID NO: 395076 - RNA, 123 nt, Homo sapiens
ggaguucauuguagauucugaauauuugcccuuugucagaugaguagguugugaaaauuuucucccauuuuguaaguugccuguucacucugaugguaguuucuuuugcugugcagaagcucu

SEQ ID NO: 395077 - RNA, 61 nt, Homo sapiens
uggaaaauuaggggagguuauacuauaaaauauuaacaguguaggaaauccuaguuaucca

SEQ ID NO: 395078 - RNA, 56 nt, Homo sapiens
guugguucuguuuauaugcuggauuauguuuauugauuugcauauguugaaccagc

SEQ ID NO: 395079 - RNA, 101 nt, Homo sapiens
gccuccuccuucugccaggagcgacauugguugcuuugguugggggaagcccguguucagccaacacccagugggguuccuggacaaggguauagagaggc

SEQ ID NO: 395080 - RNA, 78 nt, Homo sapiens
aguaagagaagagaaaagaaguguucagaucuucacuuccagaaagagaguggauacauuuuuccuccucuucuugcu

SEQ ID NO: 395081 - RNA, 60 nt, Homo sapiens
cuggaaagcaaguccauugcuccaaaagguacauuuuagagcaauagacuugcucuccag

SEQ ID NO: 395082 - RNA, 60 nt, Homo sapiens
gaaguggaauuggcuggauccuaugggguucuuccauagguugucaucagucuccacuuu

SEQ ID NO: 395083 - RNA, 89 nt, Homo sapiens
gcacugucuaccaagcccagcccuacacagacugacucacaccucacagggugggcaggagauguggacuguggcuccugggacggugc

SEQ ID NO: 395084 - RNA, 59 nt, Homo sapiens
aucagagugaauaaugacaaaacauuguagcuuggucguuuugcacucuucauucugau

SEQ ID NO: 395085 - RNA, 78 nt, Homo sapiens
auaggguuuuugguuauauauauacacucuuguauuaacauagagugucaauauaacucaaagaaugcaagacccuau

SEQ ID NO: 395086 - RNA, 118 nt, Homo sapiens
ucuuauuucuuucaaagccugccauaucugagaacuaaugaagaauuuauuugugcuaaugaauauguauuaguucuuuuaagaugagauaugcauauuuuaguaggaaaugccgaga

SEQ ID NO: 395087 - RNA, 57 nt, Homo sapiens
uucagagugguaugaagugaugauguagauauuugucauuccauuuccagcucugaa

SEQ ID NO: 395088 - RNA, 92 nt, Homo sapiens
auaucacagaguguacacccacugugauauuaggagaaagcucucccuuggguauuagaauaauaucacaggguguacacucacugugauau

SEQ ID NO: 395089 - RNA, 70 nt, Homo sapiens
cugaacugggaucuccguugaucucagggcaaccuuauuuuugcccugagaccaacagauuccaguucag

SEQ ID NO: 395090 - RNA, 96 nt, Homo sapiens
gaauuuauagauuaauuuguugagaaguaguauguuuauagcauugaguccuacgauucauaauauauauggcauauauuucaguuuagucaguuc

SEQ ID NO: 395091 - RNA, 78 nt, Homo sapiens
gcagaaauuuuguuacugucuuccugauugcuuagggccucuggguaacagacaaggcaguagccaaccguuucaugu

SEQ ID NO: 395092 - RNA, 70 nt, Homo sapiens
ucaucucaguuucuugccguaccuccuccccuagauauaacugcagguacuuacggccagaagcagguga

SEQ ID NO: 395093 - RNA, 78 nt, Homo sapiens
ucaccaggucaaaugccaacuuauggcuaugcacagugguuacaauugugagcuauggaguuguagaggucuggauga

SEQ ID NO: 395094 - RNA, 63 nt, Homo sapiens
uauagcagccugaacaaaguaaggaaaaugguaacauuuaguacuuuugacacaggcccuaug

SEQ ID NO: 395095 - RNA, 66 nt, Homo sapiens
agccaguggaucuuagcuggcugggcuccguugggggugggauccacugagcuagaccacuuggcu

SEQ ID NO: 395096 - RNA, 92 nt, Homo sapiens
gucauccaggagcugugagaaaugcagaaucucaggccccagcccagaccuacuggauuugagucugcauuuuggcacaguccccaggugau

SEQ ID NO: 395097 - RNA, 89 nt, Homo sapiens
augugaauuuuuuuaggaguuacuuaugguuuauagcaggauagaaacaauuauuguuaugugccaauuaggauuccaaggauucacau

SEQ ID NO: 395098 - RNA, 60 nt, Homo sapiens
ucuaggggcuuaaauaacugucuauaaguauucuugaggaaguaauuuuaggccuguaga

SEQ ID NO: 395099 - RNA, 76 nt, Homo sapiens
auauagauacuauagcacauauauuucccaaaacauaauauaauaugugugugugugugugugugugugugugugu

SEQ ID NO: 395100 - RNA, 115 nt, Homo sapiens
gggagagcuacuguuuuauuugguuacauagagaagguagcaguaaaggaacugaaugauacuggaaaccuguuugcccuuuagguaacuauauagaacugaaaagaccuuuccc

SEQ ID NO: 395101 - RNA, 100 nt, Homo sapiens
ugaggcaggagaaucacuugaaccugcgaggcggagguugcaguaagccgagacugugccacugcacuccggccuggcaacagagugagacuccgucuca

SEQ ID NO: 395102 - RNA, 130 nt, Homo sapiens
ucaagagaguuuaugaaaggaaugagugaccuuuauguuaucaaaaagcuaaggaaguaucuguacaugcuuaccuuccuugaaugauguaauaugggucugucaggguaauuauuuaaacucuuucuga

SEQ ID NO: 395103 - RNA, 89 nt, Homo sapiens
uuguaggaaucacugcggaagcaugaggagcacuuagacucaugcccaaugagcuuguggucuucguguuauuguccucaucacugcaa

SEQ ID NO: 395104 - RNA, 73 nt, Homo sapiens
ucugugcauguaugcgugaguucgcauguuugugugucugaguaagcucacguuuuacauguaugugugcaga

SEQ ID NO: 395105 - RNA, 70 nt, Homo sapiens
guucuuuuguacauagcaggccucaauuccugacgucuuuggaaucuguguguaaauaugauagaggaau

SEQ ID NO: 395106 - RNA, 107 nt, Homo sapiens
uccugauaagauaagcuaaugaauuccagaugggaguucuauucuauuucuccagaaacccagagaagagcucuuucuaggccacagcagccuaucaggaagcagga

SEQ ID NO: 395107 - RNA, 88 nt, Homo sapiens
uauguugaauagaaguguugaaaguggacauccuugucuuguuccaguucucagggggaaugcuuucaacuuuuccuuguucaauaua

SEQ ID NO: 395108 - RNA, 76 nt, Homo sapiens
uggcuugagccugggaggcagagguuucagugaguugugaucaugccacugcacucuagccugggcaauagagcca

SEQ ID NO: 395109 - RNA, 72 nt, Homo sapiens
uaggaaugugagauuuuauuaagcauaacaacucaaauguugauguccaguucauagaaacuccaucuccua

SEQ ID NO: 395110 - RNA, 66 nt, Homo sapiens
ccacugggucugaaggacagagcaucaaaccaaagaggauuguucuugagccuuuagaccuaaugg

SEQ ID NO: 395111 - RNA, 73 nt, Homo sapiens
cauggcccuggguccauaggaagccugccauggucacacaacagcugccuaguccuauggaagccagacugug

SEQ ID NO: 395112 - RNA, 87 nt, Homo sapiens
gauguaagacaaaauaaggcaugguuauuaagaaguaaucuaggaauuugauuacuucauucuugaccuugcauauuuagacccauc

SEQ ID NO: 395113 - RNA, 65 nt, Homo sapiens
ggauucauggaaggucagaugcagaacuucaccccuucaacucugugucccaaccccauggguuc

SEQ ID NO: 395114 - RNA, 67 nt, Homo sapiens
gaauagaauguauauucuguaguuguuggguagaauguucuauaaguauccauauauacauuuguuc

SEQ ID NO: 395115 - RNA, 67 nt, Homo sapiens
gguggaguuugacaugccuuugggauacuguaugaguuuccuagggcuguguguacaaauuaccauu

SEQ ID NO: 395116 - RNA, 74 nt, Homo sapiens
ucauauugccucagugacuuugggggaguuuguugaacuuucucucaaccccaaguuuacugggggaagaauga

SEQ ID NO: 395117 - RNA, 65 nt, Homo sapiens
acauaaaaccuuuaaguuguuuugaaaagcugaauguugcaggagagcuaggcagagguuugugu

SEQ ID NO: 395118 - RNA, 90 nt, Homo sapiens
gggaacuuguuaaagauucagauucuuaggccucacccuagagcuaacaaaucagaguaucugggagacuacauuuuuaacaagcuuccc

SEQ ID NO: 395119 - RNA, 62 nt, Homo sapiens
guacaaccugucauuuugauugccuggugcucugguacccucaagggacugacagaaugugc

SEQ ID NO: 395120 - RNA, 69 nt, Homo sapiens
agaguugucaaguaaauguuaugguuaucuagaaacugaauggccauuacauuuacaaaugucaauacu

SEQ ID NO: 395121 - RNA, 69 nt, Homo sapiens
cuuaggguugcaauaaaauaucuguacucaauaacuauucauugaaugauggaguaauguaaucuugag

SEQ ID NO: 395122 - RNA, 56 nt, Homo sapiens
uaaaaaauauugaucgaagggaacaguggcuguuuccuuuggucaguauucuuuug

SEQ ID NO: 395123 - RNA, 70 nt, Homo sapiens
ugaaccauaugaaauugccguuuuugugggucagaaugauggccuaauauuggugguuuuaugugguuua

SEQ ID NO: 395124 - RNA, 63 nt, Homo sapiens
gcauauauuagaugauuugccuuacauaugucuucauugagguagaaugauucuaauaugugu

SEQ ID NO: 395125 - RNA, 64 nt, Homo sapiens
accgauaacuugaaaagcuuggacuagaaugucaugaagucuguccagcuuugagaguuguggu

SEQ ID NO: 395126 - RNA, 77 nt, Homo sapiens
gccugagaaauuagcauggucacuuugggccccauaccuugggguaugugggcucugaccugacuuuaaauccaggc

SEQ ID NO: 395127 - RNA, 67 nt, Homo sapiens
gaacauggcucuguuuuuuaugcucuauugaaaaugaucaucagaagcagaaacugggcuuguguuc

SEQ ID NO: 395128 - RNA, 73 nt, Homo sapiens
gccugagucacuggacauguugaagcuuuucucaugggcgagaggcuuucuuugugcuccagguggacuaggu

SEQ ID NO: 395129 - RNA, 60 nt, Homo sapiens
uugacauguaaguacucuauagguaaaaagccauucucaccugucagggauaugugucag

SEQ ID NO: 395130 - RNA, 114 nt, Homo sapiens
gacuacuucauguauagaaguucucacuugcguuuaaugcuuugugaaauagauuccaacuagucagugucuguaaggagaacccuuccaauauacuccuugaaaagaguaguu

SEQ ID NO: 395131 - RNA, 105 nt, Homo sapiens
gcuacuuuuucucaggcagccugauuuuugugagcuuacugauuucaaauucuuugggauagguaaguaauauacagaugaggaaauggagccaugggcuguagc

SEQ ID NO: 395132 - RNA, 59 nt, Homo sapiens
aaccacauggcucaguggacauacuuauccauuaaguaugcuuauccugaccauugguu

SEQ ID NO: 395133 - RNA, 56 nt, Homo sapiens
acuccucucugagaccuggagcugguaccugugaaagcccagugucagagaagggu

SEQ ID NO: 395134 - RNA, 57 nt, Homo sapiens
gaguacaaggcaggggcucauggcugcuagagcccaucacagagccuuccuugacuc

SEQ ID NO: 395135 - RNA, 60 nt, Homo sapiens
ugguagugugagucuaaauugguucaacuucuauagagagaaauuuggcagcaucuacca

SEQ ID NO: 395136 - RNA, 71 nt, Homo sapiens
gcauuacauagucaaggugucucauuucuaacaaauaccagaaauuacacuuguaaauggcauguaugugu

SEQ ID NO: 395137 - RNA, 61 nt, Homo sapiens
uuuugguccaguucugugauauugcuguugaucaagggcaaugaaaugaauucgaccagga

SEQ ID NO: 395138 - RNA, 65 nt, Homo sapiens
auaggaaguuucuugauuacuuauucaaucuuuuuacuuuuaauaggucuaaggagacuuucugu

SEQ ID NO: 395139 - RNA, 89 nt, Homo sapiens
ggaugaucagaaaggagaucaguaguaagauggaggaacaccagggaaagaucaucuugccacuucauccccuuuccagcuccccaucc

SEQ ID NO: 395140 - RNA, 66 nt, Homo sapiens
ugaaagaaguucuacucugaguaaaaugcuauuaaauagcaugacauauuguagagaaaucuuuca

SEQ ID NO: 395141 - RNA, 106 nt, Homo sapiens
ggguguccccugugaggcuggggucuuuauggacugggaaggggaagcaaugugcuuaguccgacagcugucuuggagaacucagcuuggcaaggagccuuggccc

SEQ ID NO: 395142 - RNA, 77 nt, Homo sapiens
accuuggauguagaaugacaggcaaaguagcuaaguaaauguugguugaaguagcauuucaugucuacaucacaggu

SEQ ID NO: 395143 - RNA, 59 nt, Homo sapiens
ugagacugaguuuugccuuuguuguccaggcuggagugcaaugacacaaucucagcuca

SEQ ID NO: 395144 - RNA, 93 nt, Homo sapiens
auuagcagugagauuuaguugcauucaugugagagugagauucuaugggauucauucuuaacuccugaguugccacuuugugucaucuuuggu

SEQ ID NO: 395145 - RNA, 77 nt, Homo sapiens
ugagaauaaaauugcaaugcgaggcagagguagugaaccuuuauuuuccucugcguuuuguuagcagcaaguuguca

SEQ ID NO: 395146 - RNA, 67 nt, Homo sapiens
cauguaacaucccgcuguaggacaucugccauuuacaucuccuuugccugcuguggagauuuacaug

SEQ ID NO: 395147 - RNA, 63 nt, Homo sapiens
ucuuuguuagaacccucuccuucacccccagagcaggaaggagaguggugucucuagcaaaga

SEQ ID NO: 395148 - RNA, 66 nt, Homo sapiens
uggguagguguggccugaauguugucaguuacccacuucuauaaauaucccagucacaucuaccca

SEQ ID NO: 395149 - RNA, 108 nt, Homo sapiens
agccaaaaaugucuggaaggauguuuagauaguaaagccauuagcuuauaugauuaaaaauaugaaagaaaaugaaucugcuuuuggacauguugagauaaaaagguu

SEQ ID NO: 395150 - RNA, 63 nt, Homo sapiens
uagacugguuuagcacugaauagaauuaaucuugacccagagagugcuaaauauaacagucua

SEQ ID NO: 395151 - RNA, 69 nt, Homo sapiens
gugacugcauccauccaggcuuuagcugcaagcuggauccuguuucucuuggaaagugcuagaagucac

SEQ ID NO: 395152 - RNA, 89 nt, Homo sapiens
ggcugggucaaacaguauuucuaguucuagauccuugaggaaucgccacacugaauuccacaaugguugaacuaguuuacagucccacc

SEQ ID NO: 395153 - RNA, 65 nt, Homo sapiens
caccagcacauuaguaucuaagaacaugaaaguucagcauaugucuuuuaccuaaugagcuggug

SEQ ID NO: 395154 - RNA, 58 nt, Homo sapiens
ugcacuuuuuugauuagcguauagguuggcauucuguggcauuuucagaaaggaugca

SEQ ID NO: 395155 - RNA, 98 nt, Homo sapiens
gaugugcugcugaacuagguuugccaguauuuuauugaggauuuuugcauugauguucaucagggauauuggccugaaacuuccuuuuuugguguguc

SEQ ID NO: 395156 - RNA, 73 nt, Homo sapiens
agcccccagcacauuacaaguacuugguaggcacccaaaauuuauuaaauaucuguaauuuguugauaagguu

SEQ ID NO: 395157 - RNA, 89 nt, Homo sapiens
cacaaaccuugcuggcuucaccaccugcugaucauagagcccuagggccuugagugaacauaggugguagccagguagugguuacagug

SEQ ID NO: 395158 - RNA, 58 nt, Homo sapiens
uagaaaguagggaagguaggauuuuaaccuaggguggucuuacuuuuuuuccuuuuua

SEQ ID NO: 395159 - RNA, 71 nt, Homo sapiens
auuuaaagaggacgucaaguguuuuuggaaauugaaauaaauuaccggaaugaaaauguccuucaguaaau

SEQ ID NO: 395160 - RNA, 57 nt, Homo sapiens
ggggcugugaccugccauacagagggagagcuccucugucacuggggcacauguccc

SEQ ID NO: 395161 - RNA, 57 nt, Homo sapiens
ccuggaguaugauguuagcguugggcuuuucagauaaugccuuuauuauauuugagg

SEQ ID NO: 395162 - RNA, 64 nt, Homo sapiens
gggaacuuaguaucuuacucuucucagcaagggaguuagcugagaaugacugggcaugcugccu

SEQ ID NO: 395163 - RNA, 108 nt, Homo sapiens
caguagggacaggaggauuuugugggggcucgugucacugugaggauauuguaguggugguagcugcuacucccacagugacacagacccauucccaaagcccuacug

SEQ ID NO: 395164 - RNA, 100 nt, Homo sapiens
gcaaaaugguauaacugagagauggcauggugcaggguuuaagagcacagucucuagauccuauaugaugcucagucuuggaacucagcaaccauauugu

SEQ ID NO: 395165 - RNA, 67 nt, Homo sapiens
aagcuagaugaaacaucuuuggaaacugaaaguauacuuacagauuaaguauguugucaacuaguuu

SEQ ID NO: 395166 - RNA, 57 nt, Homo sapiens
ucuaucuguuagaccaauuggccccauucuuagguaaguucaucucuaauaggugga

SEQ ID NO: 395167 - RNA, 129 nt, Homo sapiens
uguuuguguauugugugauguguccaccugcacuggcauacuacacauguauauggaagacuguauuagcauguucguguaugugagaaugcucaugugugggugaaugcaagaguauguguguaagca

SEQ ID NO: 395168 - RNA, 97 nt, Homo sapiens
cugguuuaauauuccuggaauauuaaauguuuggcuggagaugaucaaguugccaagauugguuuaauauuccuggaaggaugaagaaaggaauuag

SEQ ID NO: 395169 - RNA, 63 nt, Homo sapiens
cccucuucuacauucuugagcugaccuagaauuaggguucccccuuuggcaaugagaacaggg

SEQ ID NO: 395170 - RNA, 89 nt, Homo sapiens
ggagaaucacuugaaccagggaggcagagguugcagugagccaagguugcgccauugcacuccagccucggcaacaagaaugaaacucc

SEQ ID NO: 395171 - RNA, 68 nt, Homo sapiens
ggagcuagucaguuugguuaaucauuccauagauuuaccuaugugaggccccagaacuggcugacucc

SEQ ID NO: 395172 - RNA, 55 nt, Homo sapiens
aacacagcaucccuuaggucgucaugcaaaaguaaugauaugguuuggcuguguu

SEQ ID NO: 395173 - RNA, 85 nt, Homo sapiens
gaacauuacaguugguguacauauauguauguaugucuguuacauucacaguuaggaguauauauaugcugcacuacauauguuc

SEQ ID NO: 395174 - RNA, 59 nt, Homo sapiens
gggcauaguaggaagagagaugguuacugugggaacuauaacuuuuaauuuacuggccu

SEQ ID NO: 395175 - RNA, 57 nt, Homo sapiens
ggcugcauggucuggaaguucaccugggugucugacuucaucauacuauguguggcu

SEQ ID NO: 395176 - RNA, 62 nt, Homo sapiens
auuaagauaguaaacauuuucugcuuugaaggccagacagucucuguugcugcuguuuuaau

SEQ ID NO: 395177 - RNA, 77 nt, Homo sapiens
ugaaaauguguagcaggacaauaugggaucaggaaaccaaguguucugacucugcauugucugccccuccguguuca

SEQ ID NO: 395178 - RNA, 127 nt, Homo sapiens
caauugagagaccagaaagcaggaccucuuuggaugaggagauauucugcuggauggcuucuuaaaaguuuccucuggaauuaucugccucauuaauaaugguuuuugucuuagaagucucuguuug

SEQ ID NO: 395179 - RNA, 116 nt, Homo sapiens
gguguccuuugaccguuucccaugaaugaucagucucauuauaggaauauggggugaugcagaaauccaaaguauuccacuggcacugcauuugcaugcaauguucgaaacucacu

SEQ ID NO: 395180 - RNA, 58 nt, Homo sapiens
agagaugaagauggggcucccggaagccacccggccccucuggcccagucuucucuuu

SEQ ID NO: 395181 - RNA, 112 nt, Homo sapiens
cugucagaugagugagacuuuuggaacuucaagacuaaaucuguggccuggaauccagauucagguaaucuauuugucuuuuuacauuuuaaaaauguauccuuuaugacag

SEQ ID NO: 395182 - RNA, 58 nt, Homo sapiens
gaaaaucccagcagcuauguaugggaugguuacaccagacacugugcuaaggauuuuc

SEQ ID NO: 395183 - RNA, 82 nt, Homo sapiens
auuagauuugugcaaaaguaauugcgguuuuuaccaucaaaaggaauggcaaaaaccgcaauugcuuuuguaccaaccuaau

SEQ ID NO: 395184 - RNA, 99 nt, Homo sapiens
gaggcaggagaaucacuugaacuugggaggcagagguugcagugagcugaaaucaugccauugcacuccagccuggccgagaaagcaagacuccgucuc

SEQ ID NO: 395185 - RNA, 64 nt, Homo sapiens
ggcaauaagagaugucuuauguuucccacccgcugaggaaaguaacccauucucuuacuuugcc

SEQ ID NO: 395186 - RNA, 72 nt, Homo sapiens
ugaagggcaaacacugugugauuauuucaauugaugcugagaaagcauuugaaauaauucaacaucccuuca

SEQ ID NO: 395187 - RNA, 71 nt, Homo sapiens
ugguguugcuguuuucaaggcauucugggagaaacaccuucacaguugauugaaacacagcugccacacca

SEQ ID NO: 395188 - RNA, 78 nt, Homo sapiens
ggauucgguuugccaguauuuuauugaggauuuucguauggauguucaucagggauauuggccugaaauuugccuucc

SEQ ID NO: 395189 - RNA, 77 nt, Homo sapiens
ggcuggagugcaaaugggaugauuaugguucacuacagccuuuuucuuuggagaucagcaaucaucacacuucagcc

SEQ ID NO: 395190 - RNA, 63 nt, Homo sapiens
cagcaucuaagugaguuauugacugaauaugaaaugaucagauugaugcauacuuaaauguug

SEQ ID NO: 395191 - RNA, 93 nt, Homo sapiens
uuguuauuuauuccggucuuucucacaucagauuugaccaacucuaccugacuugaucaaaucugagugagaauuccaaauuauggguaacaa

SEQ ID NO: 395192 - RNA, 63 nt, Homo sapiens
uuggacguggaggacagacacucuguagguuugaacaucucagaguacuuuucccacuuccaa

SEQ ID NO: 395193 - RNA, 61 nt, Homo sapiens
ggagaugauuugccccauguauuuucuagaguccaaugaaagacugggugaaucacuuucu

SEQ ID NO: 395194 - RNA, 66 nt, Homo sapiens
guuaagaauguuauugcuuuagagcuucuuuugggguauuccugaaguaauaaauggauucuuaac

SEQ ID NO: 395195 - RNA, 59 nt, Homo sapiens
cucaacuuacuguguucauuggguaaaccaaccauucugauaacacaguuguguuugag

SEQ ID NO: 395196 - RNA, 60 nt, Homo sapiens
gugcaacaucccuccauaauuugauagggcauauuuauauuaccaaggggaugucugcau

SEQ ID NO: 395197 - RNA, 55 nt, Homo sapiens
gagaauggaguagaacugacaauuagaccuaucugucaugagucuccuccaucuu

SEQ ID NO: 395198 - RNA, 60 nt, Homo sapiens
auggaagcugauuagauaguacucaccagaucaagggugggucugccuuccccagcccau

SEQ ID NO: 395199 - RNA, 130 nt, Homo sapiens
uaugaaaugcccacaacuaacaucacacucaauggugaaagacugaaagcuuuucuuuccucuaagauacagaacaaggaaaggaugcucacucuuaucacuguuaaucaacauaguacuggaagucaua

SEQ ID NO: 395200 - RNA, 82 nt, Homo sapiens
aaaaaauauggaugccuggguccuaucccacaccaauuaaaucaggaacucuugggaugaagcccuaggguugguauuuuuu

SEQ ID NO: 395201 - RNA, 85 nt, Homo sapiens
ccugguagcuugcaagaaaugcagauucucagguccuacccagaacccuuugaauuggaaucuguauucuagcaagaucccuagg

SEQ ID NO: 395202 - RNA, 82 nt, Homo sapiens
guauguugcccaggcuggagugcaguagugauucacagaugugaucauugcacaucacagccucaaauuccugggcucaagc

SEQ ID NO: 395203 - RNA, 81 nt, Homo sapiens
uuuccuccccucagagcacaguuuaugacaguucaaguuuuguucucuguucuguaagcugcuguugugcaagggaggaga

SEQ ID NO: 395204 - RNA, 55 nt, Homo sapiens
cugucuguuucaaaagugguuauccuucauugagcaccaaaugugcaacaggcag

SEQ ID NO: 395205 - RNA, 66 nt, Homo sapiens
uggaagcauuuuacaaaagcacagguucagacagucugacauaauugcuaagugaagaugguuuca

SEQ ID NO: 395206 - RNA, 79 nt, Homo sapiens
cugccagugccacacagcugaaagcaaacagagcagcucagcacgcucagacuuuuugcuucacuguuuggcaaaacag

SEQ ID NO: 395207 - RNA, 121 nt, Homo sapiens
gagggcagagauggcagcaagcauuccuuggcugaggccugcauugaacuagaaggcuguugauaaggcuuaucauggggacugcagccuagccucggauagcuccuccauccuucuccuc

SEQ ID NO: 395208 - RNA, 125 nt, Homo sapiens
uuuccaguauuucaccauuaggaguguuccugcuaugaaugcuuuuggauguaucucccagugaacacaugcaaggauuaauuaaaagcauuccuaagaagggguaaucgguucucaacugggga

SEQ ID NO: 395209 - RNA, 57 nt, Homo sapiens
cugagcucauuucuuuugcuaccauguacugauuacaaggcagagauggccgcucag

SEQ ID NO: 395210 - RNA, 56 nt, Homo sapiens
ggucauagagaauucaccaggaucuaaaucuugaaugcuggugagcucauguggcu

SEQ ID NO: 395211 - RNA, 129 nt, Homo sapiens
gacaugugauguguguuggcacauguggccauauguugacacauguagacaucugguguguguguguaugcauaugugucaccauguguggaugugugugauuuguguuggugcaugugggcauauguu

SEQ ID NO: 395212 - RNA, 60 nt, Homo sapiens
uucaagagcgcugauaacauguuugaguaggauccuuaaguaacuaucugugcucaugaa

SEQ ID NO: 395213 - RNA, 63 nt, Homo sapiens
cacacugaccagacaguuauaggaauauccucagcgccauccuuauaugacuucuucagugug

SEQ ID NO: 395214 - RNA, 88 nt, Homo sapiens
uuuacugcuuguaaaaugggacugacgccucccagaucuggagaggacuuuucggagugugucuaguccuguacaccugcccugugaa

SEQ ID NO: 395215 - RNA, 55 nt, Homo sapiens
gugggaagcuggaacucccuccaucucucugugguaaggagguuccccuacccau

SEQ ID NO: 395216 - RNA, 128 nt, Homo sapiens
ggaggagaaaaaaacagccuaaagauucuucucuuaauucugacaacaguggcguuugagcaaggcagcgccaugggucagauugggcagaacaucccaggcuccuuuucccuguauuugucuuuucc

SEQ ID NO: 395217 - RNA, 57 nt, Homo sapiens
uauguccugcuacucucucaugcugcauuuuugcucuugggaaauguccaggacaua

SEQ ID NO: 395218 - RNA, 94 nt, Homo sapiens
aaugcaaucccaguaaucuugccaguuuucuugcuuuuuugaacuucuccaaguugggugaagauugguauauuauugaguauuaaauugcauu

SEQ ID NO: 395219 - RNA, 80 nt, Homo sapiens
agaggcugucuggagucuguucaauguuaucgcguaauacacagugacuuuuuuauugaaggcacuccaugauucccucu

SEQ ID NO: 395220 - RNA, 76 nt, Homo sapiens
ugugaagccacacguggcauauaaagauguguucaauuucacauugagcaccuauuaugugucaaguauacgcaca

SEQ ID NO: 395221 - RNA, 57 nt, Homo sapiens
cucaccuugugauccacccgccucggccucccgaagugcugagauuacaggugugag

SEQ ID NO: 395222 - RNA, 67 nt, Homo sapiens
uucuuaucaauauugucauuuauaacuguguagaugaucuauuguucaucuggugacuuggugagaa

SEQ ID NO: 395223 - RNA, 68 nt, Homo sapiens
agcuaucuaaauucaugucaccucuagguaagguuaaauccuucuccugugaucuggauuuuuaggcu

SEQ ID NO: 395224 - RNA, 55 nt, Homo sapiens
uucccauuguuggccagcaugucauuuugacuuuuguugguuuuauuagugagaa

SEQ ID NO: 395225 - RNA, 67 nt, Homo sapiens
guuugagcaguuuaaaucuguauuuucuaucuaauugauguguugcaagaggagacuguacucagac

SEQ ID NO: 395226 - RNA, 96 nt, Homo sapiens
gguuagaggaucgcuugagcccaggauuugaggcugcagugagcuacgaucacaucauugcacuccagccugggugacagagcgagacccuauauc

SEQ ID NO: 395227 - RNA, 72 nt, Homo sapiens
uuugcauuauuuuauuuauuuauaguuuuaacuuuuaaauggaaguggaacacauaaauagcauaguguaga

SEQ ID NO: 395228 - RNA, 122 nt, Homo sapiens
ggaagaggaugguggccagggguggcauuggcagccacagagagugcuuggcaucugcugacgggccguacgguggauccuggacacucuuggucuacccccacgccacccacacugcuucu

SEQ ID NO: 395229 - RNA, 56 nt, Homo sapiens
gacccaugauuauaucuuugacccuaaguucagguauaagcauaguugucaggguc

SEQ ID NO: 395230 - RNA, 61 nt, Homo sapiens
cuggaagguaauugucagcucauagcuuaagcugugggacuguucauuugccuugacccag

SEQ ID NO: 395231 - RNA, 78 nt, Homo sapiens
acaccucucagagccucagcuuccccaugugaaaaauggguuuaauguuucacguuggggaguugagugagucaaugu

SEQ ID NO: 395232 - RNA, 67 nt, Homo sapiens
gagcaacacuguuuauuggauagcccuaaagaacccuuuacuuggcaucuagggaacauguauguuu

SEQ ID NO: 395233 - RNA, 67 nt, Homo sapiens
ugaauuuuaucaaaggccuuuucugcauuugagauaaucaugugguuuuugucuuugguugaguuua

SEQ ID NO: 395234 - RNA, 66 nt, Homo sapiens
cugcagucccucaugcuuuaauggucccuccacgauccugugcgggauuguaaaauaugagggcag

SEQ ID NO: 395235 - RNA, 93 nt, Homo sapiens
ccauuuguaugucuucuuuugagaauugucuauuuacguccuuugcccaccaaaagaacaugguacugauuuacgaaauaggcagacaaaugg

SEQ ID NO: 395236 - RNA, 63 nt, Homo sapiens
uucuugcauuuuggagaaugcugaauuaaaauuguaggucagucuucuaaagggaugcaagga

SEQ ID NO: 395237 - RNA, 70 nt, Homo sapiens
ucguagauggcucuuauuauuuugagguaugauccuuccaugccuaguguguugagaguuuuuaucauga

SEQ ID NO: 395238 - RNA, 82 nt, Homo sapiens
gauuaauuuguugagaaguaguauguuuauagcauugaguccuacgauucauaauauauauggcauauauuucaguuuaguc

SEQ ID NO: 395239 - RNA, 64 nt, Homo sapiens
agaccaugucguaauuagcugcaaugauaggaaguuaauucauuugguucccucugacaggucu

SEQ ID NO: 395240 - RNA, 63 nt, Homo sapiens
auccuggaacuuuacugaaguuguuuauccguuccaggaacccuuugguagaguuuuuagggu

SEQ ID NO: 395241 - RNA, 71 nt, Homo sapiens
ucuuuaucugaugucuugagauggagcuuagaguauugauuuucagcuucuaauagauguacauuuaagga

SEQ ID NO: 395242 - RNA, 82 nt, Homo sapiens
gguaacagugggcaugcauuuuccuaacuagaauugaauaguggcuucccuuuuaggugggaaaugugcuuuccauuuugcu

SEQ ID NO: 395243 - RNA, 67 nt, Homo sapiens
gucuuguugaucaauagaauacaacagaaaaggugguaugccauucugagguuuuguuaucaaagac

SEQ ID NO: 395244 - RNA, 71 nt, Homo sapiens
cauauucaguggguauuaugugccagacauugcuacaagcauuuggcaguuauuuacucagugaucauaug

SEQ ID NO: 395245 - RNA, 93 nt, Homo sapiens
gcucaaagggcucuggccucauccccugauaccaaccaccaugggguuaauccuggggucggugaauuagggaaagccagguagccucugggc

SEQ ID NO: 395246 - RNA, 128 nt, Homo sapiens
gaagggacuuggaccccaagccucauaaugcuguguuuuuuggagacuuacagaggcacugucucgguggucuuugauaagauccagaagaauuaucuggauuaugaggcagugacucuuguuucuuu

SEQ ID NO: 395247 - RNA, 58 nt, Homo sapiens
gugaaguuuuuugcugagagucccucugcgugguggccucugugguauagaacuucau

SEQ ID NO: 395248 - RNA, 87 nt, Homo sapiens
gacagaguucuggcaccugauucccuugcucugagaagaggguggggccuucuuugcuuggaagcgggggacaggaagcaacagguc

SEQ ID NO: 395249 - RNA, 75 nt, Homo sapiens
guuuguccaaaucagagguaccaaaagcuauuaugacuaucugcaguaaugugauuugggccucuuuuggaagac

SEQ ID NO: 395250 - RNA, 58 nt, Homo sapiens
gugaauagugcugcaaugaacauaugagcgcaugugucuuuauaacagcacaauuuau

SEQ ID NO: 395251 - RNA, 115 nt, Homo sapiens
guuuaagaauucagugcuuccuuuuaaagagucacauugguuugcaauuaaguauuaggaaaugaaguucuaauacugcuuugauguaagcuagugugcuuggcaauuucuaaau

SEQ ID NO: 395252 - RNA, 70 nt, Homo sapiens
gcucuuucgcugggcuccgugacuggcuguucuguaaggucugguuugcuaucagagccggugaaagggc

SEQ ID NO: 395253 - RNA, 64 nt, Homo sapiens
auauuuuugguuucaccugcacgccagguauauucauuuggcugagcagaacaauuagaaauau

SEQ ID NO: 395254 - RNA, 57 nt, Homo sapiens
caugaaagugagaaacuccuggguucuguagucuuagggguagacugcacuuucaug

SEQ ID NO: 395255 - RNA, 76 nt, Homo sapiens
guguguuaucaaguaguuauacguaaaggagaaaaagcuuucugaaugccuuucauagcaugccugauaaucauac

SEQ ID NO: 395256 - RNA, 75 nt, Homo sapiens
guguuuuuugucuuugguucucuuuauaugcuggauugcaucuauugauuugcguauguugaaccagacuugcau

SEQ ID NO: 395257 - RNA, 80 nt, Homo sapiens
gcccaaugucccagacaggaugaccuguaauggacaucgacugugcugccuuccuacauccauccugcugggcagugggc

SEQ ID NO: 395258 - RNA, 91 nt, Homo sapiens
auaugcgugcaugcaugugugugaauacauguguguauagagguguaugccuaguguuaauguguguucauguguaugugugagugcaugu

SEQ ID NO: 395259 - RNA, 101 nt, Homo sapiens
gucucugaguaaacaaagugcaugacugauauuugagauacuucaugccuuaucucuggauaucuacuuauguucuauuuucauuuguuuguuuuugaagu

SEQ ID NO: 395260 - RNA, 102 nt, Homo sapiens
auuuuuguuccauauagagcauuauuauauaaucccucaugucccaggccuuagccugagaugugugugauuauauaauagucuuuuacuccuugaagaagu

SEQ ID NO: 395261 - RNA, 63 nt, Homo sapiens
uuuauuguguacuacaguaugccacacuguuaaauauugggcauguagaagugacaugaugaa

SEQ ID NO: 395262 - RNA, 64 nt, Homo sapiens
guuucugagcaugagcucauuucuacccuucuuugucugugacgugaguuccuuguucagaagc

SEQ ID NO: 395263 - RNA, 75 nt, Homo sapiens
ugcuuguagagcaguguuacaauuagucaaauucuguacuagaaauauggccuguaacgcugucucagccaggca

SEQ ID NO: 395264 - RNA, 77 nt, Homo sapiens
augaagcucuucaaagacacacaaggagaagguucuaacacaugggccugaugaauuauguguuuuugaugacucau

SEQ ID NO: 395265 - RNA, 60 nt, Homo sapiens
aaaccucugccuggaucucagacgauguauggaaacaccugaaugucuaggcagaaguuu

SEQ ID NO: 395266 - RNA, 83 nt, Homo sapiens
uucauuauucacuccauuucauuuuagcucuugaagucaaaaugggauuccaaagagcaaaauagaaguuuggagaguuugaa

SEQ ID NO: 395267 - RNA, 61 nt, Homo sapiens
ugcugaugaaguauuuguucuggagacacaucccuuugauuccagaauuauguuaucugca

SEQ ID NO: 395268 - RNA, 71 nt, Homo sapiens
cugucucuucuugcuuuuugcuguugaaaguugcuuuuagcuucacaaugcagagggcaguggaagaacag

SEQ ID NO: 395269 - RNA, 64 nt, Homo sapiens
guguuugugugugauuauaaaaggucagacagaucuggaaucuuugcucuaucacugcaaacau

SEQ ID NO: 395270 - RNA, 59 nt, Homo sapiens
uugcuugaagugggugguguaaaaucucccacugauuaaacagcacugguuucaagcaa

SEQ ID NO: 395271 - RNA, 77 nt, Homo sapiens
gcaauuucagaggguagagaaaucacaagugguguaagaaccaaacugugcaugaaauuuaccuuuaaugcauuugc

SEQ ID NO: 395272 - RNA, 78 nt, Homo sapiens
uggucugcauucaugguuuuauaacccucuugcccaauuuuuacaucuagcaaagagaaauauaaaaccauuugacca

SEQ ID NO: 395273 - RNA, 76 nt, Homo sapiens
ucaccauucugacuggugugagaugguaucucacugugguuuugauuugcauuucucuaauagucagugauguuga

SEQ ID NO: 395274 - RNA, 66 nt, Homo sapiens
ccgauuuaugucucugacuugauuuauggaaauaauacuaguuguugcaucagcaggcauaauugg

SEQ ID NO: 395275 - RNA, 73 nt, Homo sapiens
uauugcauauuauucuaguggcuuuuaucucuuacgaaacauacugugguaaaaugacuagugauuugcaaua

SEQ ID NO: 395276 - RNA, 89 nt, Homo sapiens
ggagaaucacuugaacccaggagguaaaguuugcagugagucgagaucaugccauugcacuccagccugggcgacaagaccgaaacucc

SEQ ID NO: 395277 - RNA, 77 nt, Homo sapiens
gagaguuuugaucauaaagggaugcuagauuuuuucaaaugcuuuucugugucuacugagaugaucauguuauuuuu

SEQ ID NO: 395278 - RNA, 60 nt, Homo sapiens
gcaucucucccgggcuuugugguuuccuccgcugguaucacaaagcuggagggagacugc

SEQ ID NO: 395279 - RNA, 59 nt, Homo sapiens
accucaggcugaaauucaggcauuuggagcaucauuugccuagaccaucagccugaggu

SEQ ID NO: 395280 - RNA, 57 nt, Homo sapiens
ucugccacugucauugugugauuggugcugcacaccaaccauaggggacaguguagg

SEQ ID NO: 395281 - RNA, 76 nt, Homo sapiens
uccuucaguggaugauguuuucuguggucuuguucaggaauuuacaaacuagaggaagccuuaucucaccaaggga

SEQ ID NO: 395282 - RNA, 62 nt, Homo sapiens
gcuagaguaguuucuauauucuucagccgaaaucugguuaagagcauauagacuuuuuuagc

SEQ ID NO: 395283 - RNA, 74 nt, Homo sapiens
ugcaucagugacugggccuagaguuagcagaauuacaggaugguugagcaagcuuuggagccuaacucuaugcg

SEQ ID NO: 395284 - RNA, 77 nt, Homo sapiens
uacccucuggauacccuuguucauaaagucuguauuguggcuuuuggugggggacguggggagguucagaguuggua

SEQ ID NO: 395285 - RNA, 56 nt, Homo sapiens
ucaagaucacaguuuauguuggaacuaaauuugaguuauaauaacugugaccuuga

SEQ ID NO: 395286 - RNA, 65 nt, Homo sapiens
cauggagcuaggcuugaucccuggucugcauggcuuuagagccuggggucaagguggcugccaug

SEQ ID NO: 395287 - RNA, 102 nt, Homo sapiens
aucuuauuauauauuauuguuaaucucuuacuaugucuaauuuacaaauuaaacuuuaucguagguauguauguaugggagaaaacauaguauauuuaaggu

SEQ ID NO: 395288 - RNA, 82 nt, Homo sapiens
aguuguaggguacaugugcacaacgugcagguuuguuacauauguauacaugcgauauguuggugugcugcacccauuaacu

SEQ ID NO: 395289 - RNA, 74 nt, Homo sapiens
aggcuuaauacuaggugauggguucauaggugcugcaaaccaccaugacacauguuuaccuauguaacaaaccu

SEQ ID NO: 395290 - RNA, 82 nt, Homo sapiens
uauaguuaaaggaauucaagcauugccaagcaaguggagauacauuugagaucuugauauguuugaaaacucuuugucuaug

SEQ ID NO: 395291 - RNA, 61 nt, Homo sapiens
cuaaacugucuugcaguuacaugugcauguguauauguuuaugugaguaagagaguuuuag

SEQ ID NO: 395292 - RNA, 93 nt, Homo sapiens
ugcauaaaauaacuuggauauucaagugaggauggcuaauccaaacaaugcuuagcauucucauuugcauaaagagcuuugaguucauaugca

SEQ ID NO: 395293 - RNA, 59 nt, Homo sapiens
ugagaagaugaacuccuuggucugccuucucugccgacgccuucacgagugucuucuca

SEQ ID NO: 395294 - RNA, 114 nt, Homo sapiens
aggcuguacaagucucacauuucuuguucaugauucauguugaugcccaugggaaaguacccuuugaggaugagcaucaccagaaucaauaagcugaucagacuugcacugccu

SEQ ID NO: 395295 - RNA, 76 nt, Homo sapiens
guguccaguuguuuucugagguugugccuuucucauagagccuuuccaaaugcaccuaaaagcaacugauugacac

SEQ ID NO: 395296 - RNA, 80 nt, Homo sapiens
ucagauauuugggcaaguggcaugaccauggauuauuucacugguuuucuuccucguagcccuugcucuccagcuauuga

SEQ ID NO: 395297 - RNA, 55 nt, Homo sapiens
uugagauggagucucgcucugucacccaggcuggagugcacuggcacuaucucag

SEQ ID NO: 395298 - RNA, 113 nt, Homo sapiens
uucuuuucuucuugaggucccaaaauaucuugagguuccuggaccugcuagaaagugucauucuuuauuuaucacaggucaggaaucuugcaagggaaccauaagacaaggaa

SEQ ID NO: 395299 - RNA, 88 nt, Homo sapiens
gcucaggccuguaaucucagcaccuguaaucucaggccuguaaucucggugaauugcuugagcacaggaguuugagaccagccugggc

SEQ ID NO: 395300 - RNA, 61 nt, Homo sapiens
gaggacuuggaaaaugggagcugguuuuauaauaauuaccccgagacugccaagaauccuc

SEQ ID NO: 395301 - RNA, 78 nt, Homo sapiens
ugcuauugugaauagugcugcaauaaacauacgugugcaugugucuuuacagcagcaugauuuauaauccuuugagua

SEQ ID NO: 395302 - RNA, 61 nt, Homo sapiens
uugcuccccaggaaaggaagcaugaccuugggugagacaguucucuuuggcugggaagcaa

SEQ ID NO: 395303 - RNA, 57 nt, Homo sapiens
acaaguauuggugaggauguaggauguagagaaaucagaguucccaccauugcuugu

SEQ ID NO: 395304 - RNA, 58 nt, Homo sapiens
ugagaugaaagcagaaagacuucaguguacauuuauugagucugacauuuuucucuca

SEQ ID NO: 395305 - RNA, 67 nt, Homo sapiens
gugagaacugugucuuauaaacguugcugucuuagaauuaaugacgaggccgggcacaguugcucac

SEQ ID NO: 395306 - RNA, 92 nt, Homo sapiens
uaucuacaucacugaaaacuuacaaagcuauagcaccagagggaacuccugaggucucucgcuauagguuuugcaauucauaauuggagaua

SEQ ID NO: 395307 - RNA, 77 nt, Homo sapiens
guguguugucuuucauuuagucccuccaguuuggguuucucuuguaggacuagggacauggggagcugauaccauac

SEQ ID NO: 395308 - RNA, 79 nt, Homo sapiens
ucaggauuucauuaguuuucacuuacagaauuaauuuuaggucacugggaugcuguaugugagaaauaauaaguuuuga

SEQ ID NO: 395309 - RNA, 128 nt, Homo sapiens
ccugccccuggccucccaaagugcugggauuacaggcuugagccaccgugccuggccacaaagauggucuuuugccgggugcaguggcucaugccuguaaucccaguacuuugggaggccgaggcagg

SEQ ID NO: 395310 - RNA, 66 nt, Homo sapiens
cuuaacagugguauugaugaccauuaauccuucaaccuaaaccugcucauuaaugcugccuuuaag

SEQ ID NO: 395311 - RNA, 68 nt, Homo sapiens
guaaauuaaacucuauaauagcuauguauaaauaagaaaaaauacauaguagauauaggguuuauugc

SEQ ID NO: 395312 - RNA, 89 nt, Homo sapiens
agaguuuuuaauuaugaagugauguugaauuuugccagaugcuuuuucugcaucuuuugagauaaucaugugauuucauccuuuauucu

SEQ ID NO: 395313 - RNA, 55 nt, Homo sapiens
ggcagcaucaagauccagcaggaaagaguucugugaucaauuagugaugucugcu

SEQ ID NO: 395314 - RNA, 129 nt, Homo sapiens
ugcuguguccacucaggguuaaauggauuaagggcggugcaagaugugcuuuuuaaacagaugcuugaaggcagcaugcucguuaagagucaucaccaaucccuaaucucaaguaaucagggacacaaa

SEQ ID NO: 395315 - RNA, 58 nt, Homo sapiens
cuagcaguauaugagagcuauuguuacucuaaaccauaacaacucuugauacuguuag

SEQ ID NO: 395316 - RNA, 87 nt, Homo sapiens
aaaggccuggguaggcccucauuggacaggucagccaaacauuugcaucagucacauuugucugaugagggccagccccaaaccuuu

SEQ ID NO: 395317 - RNA, 88 nt, Homo sapiens
cuuuacaacacaccaggagaguagacugcaacauuguaaugugccacaauauauugcaacauuguaaguuuauauuagguauaggaag

SEQ ID NO: 395318 - RNA, 94 nt, Homo sapiens
uuaugucucuacuuauugucagugcauguaaacauaaaaauauuguaauuuuauauuuuuauguuuuugcuugguuuuuaagugggguauauaa

SEQ ID NO: 395319 - RNA, 75 nt, Homo sapiens
uuuaagcugauucuaaaucauaauccaucuguugccucccaacauggcuuaugaauuuggagaagaggccuugag

SEQ ID NO: 395320 - RNA, 73 nt, Homo sapiens
gccauuggaggguuaucagggccaugaaauaaucagauguacauuuuaaggcuccuguuggcuuuuaaagggc

SEQ ID NO: 395321 - RNA, 92 nt, Homo sapiens
ugcucccaagaugacaucacacaguugccuaucuccugaagugcaaaaaagguuuuuaaggaaauaaggcaauuuugaagagguuaggagca

SEQ ID NO: 395322 - RNA, 56 nt, Homo sapiens
uuucucuggucagaggggagguuaucuuggggcuaacaucucuguggucagagggg

SEQ ID NO: 395323 - RNA, 70 nt, Homo sapiens
uuagcggguuuuagauuucuccuguguaaugucaaacagcccaaaauaagagaauccaaaacaccguuga

SEQ ID NO: 395324 - RNA, 92 nt, Homo sapiens
gccgcgauuaaaagccuuuccacacucacugcauucauacggcuucucuccagugugaaugauggagugucgaauaagguuugcgcuccggc

SEQ ID NO: 395325 - RNA, 130 nt, Homo sapiens
ccucccaaaaugcugggauuacaggcaugagcugacuucugauugaaaauggaguagcccauuccucccagguccucccuuucacaauuaaaaauuacugaacagccugcaaucccaacacuuugggaug

SEQ ID NO: 395326 - RNA, 62 nt, Homo sapiens
ugagauccugugacuacacugaccaaaaacauuuauaccagcugauggucacuugauucuca

SEQ ID NO: 395327 - RNA, 69 nt, Homo sapiens
cuugaacccaggaggcggagguuguggugagccaagaucacgccauugcacuccagucugggcaacaag

SEQ ID NO: 395328 - RNA, 72 nt, Homo sapiens
cagucuggcuccuucuacuacaugguguuucaaagucacgaaagcuacaugagguuaaaggagucaauacug

SEQ ID NO: 395329 - RNA, 70 nt, Homo sapiens
ucauauauggcuuuuauuguguugagguauguuccuucuauauccagcuuuuugaggguuuuuaucauga

SEQ ID NO: 395330 - RNA, 71 nt, Homo sapiens
cugcuugggaaagcugcagaaauucucaggacuuggaggcuugaaaugcucagggguuuuccagaaagcag

SEQ ID NO: 395331 - RNA, 80 nt, Homo sapiens
gacuugucuguguauuacuugucugugucucaauuuccucaucuucuaaaaugagaauacagcaguaaccacuggcaguu

SEQ ID NO: 395332 - RNA, 57 nt, Homo sapiens
cucuuugaugugaaccgugguugucggccucugaagaaaucauuucacaccaaaggg

SEQ ID NO: 395333 - RNA, 77 nt, Homo sapiens
acaggacucaaacuccuuauacauagcucuucuaugcuauguauagcauagaagcuauguauaggggccucuucugu

SEQ ID NO: 395334 - RNA, 86 nt, Homo sapiens
gcguccggcggcagcagccuucugcgcugggugcgcgagggguuccucaucaccugagcgggaugcucgccuccucugccggacgc

SEQ ID NO: 395335 - RNA, 94 nt, Homo sapiens
ggaaaugcuuaugucaggccugcaagaugcauaggaauuuuccaaguggggaaggaugacuagcauacuugaugcaaagaguacagcauuuacc

SEQ ID NO: 395336 - RNA, 67 nt, Homo sapiens
gaugaagugguagacacagaaaacaaaaggagaccgguuuuuuguacgccuguguccaucagucauu

SEQ ID NO: 395337 - RNA, 68 nt, Homo sapiens
cagaagagagcaagauuguucccauuuucuauuuuucuaguaggaauuaucuucaucuugccuuucug

SEQ ID NO: 395338 - RNA, 84 nt, Homo sapiens
acagcuggcaaauaguagagccaggauuuuagauugagcaaucuagugcuacaguucuuggccuuaacuacuuugcuuugcugu

SEQ ID NO: 395339 - RNA, 78 nt, Homo sapiens
aauaacacuugcaguugguauuacagaaauuaguucuuaacaguggcuucauuuucguaaugcuuuguaaguguuauu

SEQ ID NO: 395340 - RNA, 93 nt, Homo sapiens
guccuagcugugcugcccuuuuuccaucuguaaauuuuuggcuauugaaaacaugucucaagaugguagaugggaauagguuuucagaaggau

SEQ ID NO: 395341 - RNA, 71 nt, Homo sapiens
cuucuggcuggggcacagucugaauguuucugaauccagcaaagaaugcagauuugccucagggcuugaag

SEQ ID NO: 395342 - RNA, 87 nt, Homo sapiens
ggauuacagccacuguagcagacuauuuugugauaauuucuaaguacagugaaauaugcgguuguacugauacuaugggugugaucc

SEQ ID NO: 395343 - RNA, 92 nt, Homo sapiens
guagcaggccucagggcagggaagcgagauuacaagggauaaugaggcagcuaucccuugagccuggcuucucacccauugaccuuaguuac

SEQ ID NO: 395344 - RNA, 73 nt, Homo sapiens
gguuuguuacauagguauacaugugcuguggugguucacuccaucuaucaaccuguaaucuaaguuuuaagcc

SEQ ID NO: 395345 - RNA, 101 nt, Homo sapiens
gguaacaaucaucugaguuuucagcaagucauaaucuuuuugcuacuggauggccuugccuugauauuguuggcugcuggcugauagaggugguuguugcu

SEQ ID NO: 395346 - RNA, 57 nt, Homo sapiens
agaugaaugguggugaugguuacacaagcaugugaauguauuuauuaccauucaucu

SEQ ID NO: 395347 - RNA, 95 nt, Homo sapiens
aaauuuuuguagaucuuucuuauuugauugacuuuagcaggaccauuuagguuccuuuauuagugcaagucaaaucuagaggcauuuaagaauuu

SEQ ID NO: 395348 - RNA, 62 nt, Homo sapiens
aaauccauuuguucagcuaugcagaaagaguuuucuucaauauugguugagcgauugaauuu

SEQ ID NO: 395349 - RNA, 89 nt, Homo sapiens
agcagcucucugccaacuggagugucugugcuggucaaagggucucuuccugcuaagauuccagaggcucguggugagacaggguugcu

SEQ ID NO: 395350 - RNA, 55 nt, Homo sapiens
uuggcgacugcugcuaaucagggcuucuuuauuuuccuggacagcuguuugccaa

SEQ ID NO: 395351 - RNA, 57 nt, Homo sapiens
uguuuagaaaacaaaucaagagcuuuaucaacugccuugacacugguuuucugaaua

SEQ ID NO: 395352 - RNA, 124 nt, Homo sapiens
ucccaucauaucugguugugagagaaucuugguauguguuucauacucaaggaaacacauacucaaauauuccuugaguauggaaacacauaccaagauucucucacaacuggauaugauggga

SEQ ID NO: 395353 - RNA, 91 nt, Homo sapiens
auuacuuugcccacuguuaaauuuguuuuaauucauuuauaucagguuccacguuaggacucaggauuugauagauggggagucaaguaau

SEQ ID NO: 395354 - RNA, 71 nt, Homo sapiens
ugagguaugugaugucuuuuagcuaaacauucaucaaaacaaauuauuagaguaaaagcacgagugccuca

SEQ ID NO: 395355 - RNA, 67 nt, Homo sapiens
cagguggugccucagggacuuacaaaccagaagguuccaugccuuccccuuuaguggguauuauuug

SEQ ID NO: 395356 - RNA, 109 nt, Homo sapiens
aggucugggucuuuuccuguggagaguuaagcuuuuagguccuccucaccugaggccccgggcugacggaggcauuggaagcuuguaaaagucagggcugagaugaccu

SEQ ID NO: 395357 - RNA, 92 nt, Homo sapiens
uuaaacaguauaggucagaucauauucuucgcugcuuaaaacuuucuaauguguuucuauagcgcuuagaauaagaucugaauugcuuuuga

SEQ ID NO: 395358 - RNA, 80 nt, Homo sapiens
ggagugaauuauagcuaacaucugugaaaaguuauguaucugaaugcacauuuuccagcaugagcuuuaguaccaacucc

SEQ ID NO: 395359 - RNA, 68 nt, Homo sapiens
cgaaacuacuuugugauuugugcauucaacucacagaguugaaccauucuuuugauagagcaguuuug

SEQ ID NO: 395360 - RNA, 93 nt, Homo sapiens
gaggauuguuguuuauuuuagguacgcaccggcucaguggauucauauucaaaaagcugagccaguguguaccuaaaauaaacaacaauucuc

SEQ ID NO: 395361 - RNA, 69 nt, Homo sapiens
ccucuguuuuauaauaacuguagcaagauuccaaagugccuuuguggcagugcuuuaugaaaccagggg

SEQ ID NO: 395362 - RNA, 77 nt, Homo sapiens
uguaaacuugccaggcaccaaaguaugcuuuaggauaucaccaugacuagugcccuuugcugccugccaugguuaca

SEQ ID NO: 395363 - RNA, 65 nt, Homo sapiens
gauuauaaaguuuuaggauccaauauaaaacaaaaguuuuugagaucuuuuaggccuuuguaauc

SEQ ID NO: 395364 - RNA, 67 nt, Homo sapiens
guuuauuacaguagaugaggguauaaugguacaagcugucacaauaccauucauuuacucaacagac

SEQ ID NO: 395365 - RNA, 67 nt, Homo sapiens
uggagacuucauuacacaggcaucauugauuaaaucauuggugauuagugaaugaacucaaacucca

SEQ ID NO: 395366 - RNA, 68 nt, Homo sapiens
augucuucuguaggucaacaaguaugauaugaaccacagguguuaugcuuauugguguacgguaguau

SEQ ID NO: 395367 - RNA, 68 nt, Homo sapiens
aaagccuucuccagccaacacacauuuauuccuccaugaaugaaugcacugcggguggauggggcuuu

SEQ ID NO: 395368 - RNA, 82 nt, Homo sapiens
gaugcagaauuauuuuugcaauauguuccugaauauguaauauaaguguauugggaucauuuugcauccauaguuuuguauc

SEQ ID NO: 395369 - RNA, 60 nt, Homo sapiens
agcccuuagauggcuccuuccauuucuuucucaaucuggcccaaagucauuugcagggcu

SEQ ID NO: 395370 - RNA, 72 nt, Homo sapiens
uggcagaagaggccugacaauaccuaaggcuauaagaaugccucuaaaugcugcuuuggccucuucucacca

SEQ ID NO: 395371 - RNA, 87 nt, Homo sapiens
ucuccugcugugacccucaagauggaagcaguuucuguugucugaaaggaaagaaagugcuuccuuuuugaggguuacuguuugaga

SEQ ID NO: 395372 - RNA, 76 nt, Homo sapiens
agcaauaaguuugagguguauuguacagcacaaugacuguaguuaaugacaauguauuauauucucaaaaaaugcu

SEQ ID NO: 395373 - RNA, 68 nt, Homo sapiens
ggguacaugugcacagugugcagguuaguuacauauguauacaugugccaugcuggugcgcugcaccc

SEQ ID NO: 395374 - RNA, 89 nt, Homo sapiens
cucaggguucacugauguuguaguaugagucaaaauuuccuuccuuggcugggcaugguggcucaugcaugcaaucccagcacuuugag

SEQ ID NO: 395375 - RNA, 61 nt, Homo sapiens
ugcaagcacacccagggauuguugguagacaguguguuuguaccuggggacugugugugca

SEQ ID NO: 395376 - RNA, 58 nt, Homo sapiens
ucaaaucaucuuuuccaaagcucauggguuagguaaggguuuugaaaaggcaguuuga

SEQ ID NO: 395377 - RNA, 83 nt, Homo sapiens
uuauaguuaaagccauaccugagagaguucagaaagcaagcaacuaaucuauuauuucaguguaugucuuccuaaagcuguag

SEQ ID NO: 395378 - RNA, 84 nt, Homo sapiens
acagcuggcaaauaguagagccaggauuuuagauugagcaaucuagcgcuacaguucuuggccuuaacuacuuugcuuugcugu

SEQ ID NO: 395379 - RNA, 67 nt, Homo sapiens
guuuuuggaagaugccacuguaucaguuauaauuucuuuugcuagauacuuauaaucuuccaagagc

SEQ ID NO: 395380 - RNA, 79 nt, Homo sapiens
uucuuacaaggcaagaaugcgugcuuucaccacuuccacucagcaaugaauauacagguucuagccauuguaaaaggaa

SEQ ID NO: 395381 - RNA, 79 nt, Homo sapiens
aagauggacaauggauggauagaaggaugauggauggaugugugcauaaaugcuuagaucuguauauaugucuaugcuu

SEQ ID NO: 395382 - RNA, 79 nt, Homo sapiens
aauuuauauguugaaauccuaacccccuaguaccucaaaaugugauguauuuggagguaggacuuuaaagaauuaaguu

SEQ ID NO: 395383 - RNA, 60 nt, Homo sapiens
ggugaauuuugcacaauacccaggguguuaguacauuuugcauugcuguaaaggaauacc

SEQ ID NO: 395384 - RNA, 109 nt, Homo sapiens
gagcaguuauacugugcugggagcucguuuuugccucugguugccuuggacucuccaaagcccaaaggcuagaaugacuaagucacccaaauagcaaagaugguggcuc

SEQ ID NO: 395385 - RNA, 71 nt, Homo sapiens
gcaugguacuggaugguaguaugccauagauucaaccuccccuaauuuuccugcuuuuuccaguaucaugc

SEQ ID NO: 395386 - RNA, 61 nt, Homo sapiens
ucuguuuggcaugugcuggccaugugcaaacccacaauuauauuggccaauggcaaacaga

SEQ ID NO: 395387 - RNA, 57 nt, Homo sapiens
ggauaaguguuuagagcuuugggaucugauugggugagguguuaagcagacuugucu

SEQ ID NO: 395388 - RNA, 79 nt, Homo sapiens
acguggauggacaucagauguaguauuuuagugaaagaagccuaucuggaaaggcuacauacugcaucaccaucuaugu

SEQ ID NO: 395389 - RNA, 82 nt, Homo sapiens
gagaccugguuucuugaggcaagauacugauuucauuggcaucuacuagcaagucuaugucuuuuucaacaauuggaguuuu

SEQ ID NO: 395390 - RNA, 129 nt, Homo sapiens
uuuggggauguguacuuuuuuguccuccauccuucuucacaugugcguuuuggcauguguuauaacuuggcacuaaaaugcacaugugaagaaggaaggaggacagaaaaaagaguacccauccccaaa

SEQ ID NO: 395391 - RNA, 87 nt, Homo sapiens
ggagucucacucuguugccuaggcuggagugcaguggugcaaccuugguucacugcaaccuccaccucccagguucagugauucucc

SEQ ID NO: 395392 - RNA, 123 nt, Homo sapiens
aauaccacaguggguguacacacaugggguacacccacugggauauuauugguaauaucuuagagagauauaacuccuaauaucauaguggguguaccccauguguguacacccugugauauu

SEQ ID NO: 395393 - RNA, 56 nt, Homo sapiens
ccggcuguguggagaggccccugugagaggaacagagguuuccugcccacagccgg

SEQ ID NO: 395394 - RNA, 68 nt, Homo sapiens
uagguuguucuauuaucuuacagcugggauaaagcaaucacaugcucuugugggaaaguagaaaccug

SEQ ID NO: 395395 - RNA, 58 nt, Homo sapiens
uuugcccucaggaccuacagcccagccugugauguggcccagguucucugaggguaga

SEQ ID NO: 395396 - RNA, 63 nt, Homo sapiens
uuuagagcccaugugagugugaucgagugaaagcucuguguuaaugcuccauggguuauuaaa

SEQ ID NO: 395397 - RNA, 55 nt, Homo sapiens
gcacuauggcugcagaggacccaggguccaggcucgucccuguagaccacagugc

SEQ ID NO: 395398 - RNA, 67 nt, Homo sapiens
ugucuggaguccauagaagugucaccagagaaucccaauaaaagacacauuucuaaucuuccaggca

SEQ ID NO: 395399 - RNA, 71 nt, Homo sapiens
gucaaauguuauaauucaacaaucaagaugggauucgaaucugugucuaguuuugaaguauagcaguugac

SEQ ID NO: 395400 - RNA, 62 nt, Homo sapiens
cgacuggccuagacuaguguuugaccaaacaacugacuacuacuauuagucuggccaaguug

SEQ ID NO: 395401 - RNA, 62 nt, Homo sapiens
gaaaauagcacuuauagauuuggucucuaguaccaagagagcugaauucaagugcuggcuuc

SEQ ID NO: 395402 - RNA, 74 nt, Homo sapiens
ucauguagugugauuuucacuagaaggucaauguaauaccaccuucaagucugcgugaaagaugcauugcauga

SEQ ID NO: 395403 - RNA, 87 nt, Homo sapiens
ucaaaagacugucagauaauuugcauccaucuuuauugugccacacucuaguacguagaugucacuaugcaaauaucuuucuaauga

SEQ ID NO: 395404 - RNA, 71 nt, Homo sapiens
ucagaguaaggaagaaggaauaucacggacaucuuuaugggucauggugagaacuuugucuuuuacucuga

SEQ ID NO: 395405 - RNA, 70 nt, Homo sapiens
acugagacugagaauguuucuugggucauagauucccauugucagcuuacagcauucuuagugucucagu

SEQ ID NO: 395406 - RNA, 71 nt, Homo sapiens
cuucuaaauacuuugauaucuauugaucauaauuuuacucccuacuucagugagauuaaguuguuuagaag

SEQ ID NO: 395407 - RNA, 96 nt, Homo sapiens
gaaucaccuaaaguucuccuuuuaaaaugcugauauugggccccacuggcagagauggggccccauaucagcauuguaaaaggagggaucugauuu

SEQ ID NO: 395408 - RNA, 59 nt, Homo sapiens
agaaaucuauguuuugguuagauguauuuuuucaucuuuuauagaauauaggucauucu

SEQ ID NO: 395409 - RNA, 109 nt, Homo sapiens
ugucauuggaguaaugcuaggcucuguauacugaucaaacugagguucauaguuauuuuuaauauuucagcaaugacagccuauauaauaaucuagcuaucuguagaca

SEQ ID NO: 395410 - RNA, 80 nt, Homo sapiens
gcuauuucaggaccauacaugugcaaugauaaauaauccugcuggguauguuaucacacaucaugguaaaucugagaagc

SEQ ID NO: 395411 - RNA, 76 nt, Homo sapiens
ucgcuugaaccugggaggcugagguugcggugagcagagauugcaccacugcacuucagccugggugacagagcga

SEQ ID NO: 395412 - RNA, 56 nt, Homo sapiens
uguggcccagucaaguugacauauuaaauuaaguaucacacuuucucugugccaca

SEQ ID NO: 395413 - RNA, 60 nt, Homo sapiens
gggaaaugugggagagccaguggacauucagugaguaguaaacagcucugccacaauccc

SEQ ID NO: 395414 - RNA, 72 nt, Homo sapiens
gcugcuaucacucuuaggguuggagggacaaaagaaagcguucccagagccugggagugagggccaccuggu

SEQ ID NO: 395415 - RNA, 59 nt, Homo sapiens
uguuuuguuagcacucugggaacuguuagucuuucacuacccagaagcuuaacagagca

SEQ ID NO: 395416 - RNA, 114 nt, Homo sapiens
gugcaauaauuuuuaaggacguaugaauauggaguuuacuuaguguaauauuuguguuacacccacaaaaaauuccaaauugcagauguuuuauaccuuaaagcucuuugucac

SEQ ID NO: 395417 - RNA, 66 nt, Homo sapiens
gcacguggcuacccaguuguagaccacauuucuuagcuucucuugcagcuacauguggccaugugc

SEQ ID NO: 395418 - RNA, 88 nt, Homo sapiens
auguggccuguggggcagaugucuggacaccucaugcuuuccuugccuuagcugaaagguuauuuaggucugcuuguucaggccacau

SEQ ID NO: 395419 - RNA, 129 nt, Homo sapiens
ccucgacuuaccauggauauguccagauaaacccaugguaagcugaaaauaucgaaaacacacuuuugacuuacgguauuuucaacuuacauuggauuuuucgggacaugaccccaugcuaagucgagg

SEQ ID NO: 395420 - RNA, 94 nt, Homo sapiens
gcagggaaacucagacucagggaguggaggggcuugggggugggaacccagccccccauguucucucugcagcuccacaccacuguucaccugc

SEQ ID NO: 395421 - RNA, 72 nt, Homo sapiens
guguuauucaaucagaccuaauuuauauuucagcauaagcuggaaauaaaauagaguuugccugguuaaugu

SEQ ID NO: 395422 - RNA, 55 nt, Homo sapiens
augagauuguuugugugaaauaaacgcuuugugacuggcacacaggcgcucucau

SEQ ID NO: 395423 - RNA, 89 nt, Homo sapiens
ggccuccgaaaagccccucagcaucacaggcagugaguggucccuucugaccucaugccgcaugguccuggcagggucacucggcggcc

SEQ ID NO: 395424 - RNA, 62 nt, Homo sapiens
agaaaucaguggccguggucauuugcugucauucugcaauauucuaugaccaugugauuuuu

SEQ ID NO: 395425 - RNA, 113 nt, Homo sapiens
aauguggaauucaccauucguuuggcauuuuacuacucaaauuuauuccauacaaaaaaaucagaggcaaaauauuugagucguggaauacuaaaugaguggagugacacauu

SEQ ID NO: 395426 - RNA, 60 nt, Homo sapiens
gugacagucaaagacaugacuugaugcggagaugugaagugugacuuuuuugacugucac

SEQ ID NO: 395427 - RNA, 64 nt, Homo sapiens
cccagggagcucugucuguccuggaaagugucacaaguuuggggcuagaugagagcuuccuggg

SEQ ID NO: 395428 - RNA, 84 nt, Homo sapiens
guggguguguuugugggggucuguauguguaugcaugucuacauaaacagacauauaugcauacccucaccaacuacacacuac

SEQ ID NO: 395429 - RNA, 66 nt, Homo sapiens
guuacuaugagacgaaugcaucaguccaucuuaucuugaugcugcugaacauuugauucauguaac

SEQ ID NO: 395430 - RNA, 130 nt, Homo sapiens
ugaucauauuuauauucucugauuaguguguuucacaagccuuuuguuuguucguuuuucuuaaaccgcuuaauugagguaugauugacauauaaaaagcuaugcauauuuaauauauaccuuuugauca

SEQ ID NO: 395431 - RNA, 57 nt, Homo sapiens
uaggaggguagucucagccagugaugcagccuggcuucuuggcagaguugcccccua

SEQ ID NO: 395432 - RNA, 84 nt, Homo sapiens
acuggauucaguucacuguagcuuggauguuuaacuuuucaaauuacgagaaaugagccaggcacaguagagcaugccucuagu

SEQ ID NO: 395433 - RNA, 77 nt, Homo sapiens
ucaaguugaaaucucuacuauuuugaucuguauucucuuaaauauuaaagguuauaccuagggagauuccauguuga

SEQ ID NO: 395434 - RNA, 69 nt, Homo sapiens
ggcggagcuugcagugagccgugcagugagccaugcagugagcugagaucacgccacugcacuccagcc

SEQ ID NO: 395435 - RNA, 72 nt, Homo sapiens
gucuuacuuagauuugcaacuuagaaaaaucauuuugauuacaauauggaaaauagguugcgagagugagac

SEQ ID NO: 395436 - RNA, 58 nt, Homo sapiens
cucccgaguucaagcuauuuuccugccucagccucccaggaagcuggaauuacgggag

SEQ ID NO: 395437 - RNA, 114 nt, Homo sapiens
agaugucuagaaaaauuuguauaugucauaucagugaaagugaaaucuccggacaaggcucucuggagguuuuacuuuuacugcaccauagauagaacaguaaaccuggaaucu

SEQ ID NO: 395438 - RNA, 62 nt, Homo sapiens
ugagauuuggguggggacacagccaaaccauaucauucugccucuggccccuccaaaucuca

SEQ ID NO: 395439 - RNA, 100 nt, Homo sapiens
cagaacaggccgugcaguccugcugagcacagagccugggguggcccaaccgaccuuugaggccauuccaacagucuggcagcaucugcaguggucucug

SEQ ID NO: 395440 - RNA, 61 nt, Homo sapiens
auauuggacucugugcuaggaaauguaaaucuuaauaagucuuaaaaacagaauccaguau

SEQ ID NO: 395441 - RNA, 64 nt, Homo sapiens
gaguaagugcucuugaaacugccuuagcaaaauuaugacugagacagugaaagagauuuaacuu

SEQ ID NO: 395442 - RNA, 62 nt, Homo sapiens
gcugaaauguuuaauuugggaguaaacaucaacuuuaaagcaaccagguaaaauauuuuagu

SEQ ID NO: 395443 - RNA, 71 nt, Homo sapiens
aggugaugaaugaccuggaugaaugggcuuagaagagggaaaaacaaauaucacaggucaaaucauuauuu

SEQ ID NO: 395444 - RNA, 78 nt, Homo sapiens
guuguacacacuggugaauuuuuauuuaagugacucacuauugaugugacuugugaaaaguucagcauaguuggcaau

SEQ ID NO: 395445 - RNA, 63 nt, Homo sapiens
gcagaucucucuccuggauuguaauuucaauuccuuuugauauauaccuagaagagggauugc

SEQ ID NO: 395446 - RNA, 58 nt, Homo sapiens
guagaccauuuaucuggggaguuuuaucuaugggaacaauccagaugauauggauuac

SEQ ID NO: 395447 - RNA, 128 nt, Homo sapiens
gcauguucacauccccuggggagauugacaucugcuugugcccaggaugcacccuagauggggugagucaguuccugggaugcagugguguuuuguuuuuuuaaauuguccaggugauuccuccgugc

SEQ ID NO: 395448 - RNA, 85 nt, Homo sapiens
gcugaccuggugcuguagccugauugaggggcacagccuuuuccccagucuuggugucuguagcacguauguucuuagucucagc

SEQ ID NO: 395449 - RNA, 79 nt, Homo sapiens
aaguaaaagaauacugucuauucaugguauacuaugcaaagagcuucuaugcacaggaauggauggauauuuuauacuu

SEQ ID NO: 395450 - RNA, 63 nt, Homo sapiens
uugauuuaaauggacagauaaccaucuuuaccacagaagguuauuaguugauauuaaguucaa

SEQ ID NO: 395451 - RNA, 63 nt, Homo sapiens
cagcugcgcagcaguaacaggcaguggcccgccuucacccaguucuuguacucggcgcaguug

SEQ ID NO: 395452 - RNA, 73 nt, Homo sapiens
gaaagaucucaguggauacugugauguguucuccaaaaagcauuucaaugagcaccauugagcaacaucuuuc

SEQ ID NO: 395453 - RNA, 84 nt, Homo sapiens
agucaagcauuaucguaguguuggaaaacaaguguagaaaaaaguagauucuguccuugucccaaacuugauaaaaaauguacu

SEQ ID NO: 395454 - RNA, 61 nt, Homo sapiens
ccauuaauguaauuaguaaaguugcuggucaacaguaagcuauuaguaguuacauuuuugg

SEQ ID NO: 395455 - RNA, 79 nt, Homo sapiens
uggaaucaaauugucaaugaacggaauugaauggaaucauagaacagaauccaauguaaucaucauugaauugaaccca

SEQ ID NO: 395456 - RNA, 60 nt, Homo sapiens
cauggucaccuuccaaguuauuggggguuaaaacuucagggcugggcgugguggcucaug

SEQ ID NO: 395457 - RNA, 93 nt, Homo sapiens
aauuugaaauauuaacugggcauggugguacacaucuguagucucagcuacucaggaggcugagaugugaagaucacaugaacccagcagauu

SEQ ID NO: 395458 - RNA, 64 nt, Homo sapiens
uggcagaguaauacuggacaggguaucaggagaccuugauucuauuuugaguguugcuuggcua

SEQ ID NO: 395459 - RNA, 102 nt, Homo sapiens
gaggugggaggaucgauugggcccaggaguggagguaacagugagugagcuaugauuguaccacuguacuccagccugggugacaaagugagacccugucuc

SEQ ID NO: 395460 - RNA, 72 nt, Homo sapiens
cacaaaggccauuuugucuuauuucagcauugaaagcuuguuaaugagaugaucaaaguauaggcuuuggug

SEQ ID NO: 395461 - RNA, 96 nt, Homo sapiens
ucucccccauuccccuagagcuacagcccucacugucccgugaggggaaaaggcauggugacaaugggggcuguagcccuaggagaacgggggaga

SEQ ID NO: 395462 - RNA, 73 nt, Homo sapiens
uguguucaaaguaaagccucaggauggauucaaaagggaagagaauugauaagagggauacuuuagaaauaca

SEQ ID NO: 395463 - RNA, 64 nt, Homo sapiens
uucaguuugccaguauuuuauugaggauuuuugcaucgauguucaucagggauauuggccugaa

SEQ ID NO: 395464 - RNA, 64 nt, Homo sapiens
uucaguuugccaguauuuuacugaggauuuuugcauugauguucaucagggauauuggccugaa

SEQ ID NO: 395465 - RNA, 130 nt, Homo sapiens
ucuuuuguaaauugcccagucucugguaugucuguauuagcagugugaaaacagacuaauauaugugguguauuaguccguucucacacugccaugaagacauacccaagacuggguaauuuauaaagga

SEQ ID NO: 395466 - RNA, 81 nt, Homo sapiens
cugcuaaucuguguucuaauggcugagggauguguuguauauucagcaucacaccuaccucauuauggacaccacaggcag

SEQ ID NO: 395467 - RNA, 62 nt, Homo sapiens
gguuacccagaguucuaggcauuggaaaguaggauuuucugauaaaguaacucuuggugauu

SEQ ID NO: 395468 - RNA, 104 nt, Homo sapiens
acagccaguaagugauguagcuggguacaaacuuccaucuccuugacaucaggcuggagaucuuugaaguguugugccugggacuauuuccccucucuguuugu

SEQ ID NO: 395469 - RNA, 106 nt, Homo sapiens
gcuuugagcagaaccuguacccgaacuggacagagagaccggcauuuuggaguccaggauucagauuucaugucauaaucgaagguccagguauccaugccagggu

SEQ ID NO: 395470 - RNA, 127 nt, Homo sapiens
aggaaguucuuuuguauuaauauuauuaauuuucugagugcuuugauuauaaaaggguguuugauuuugucaagugccuuuuugugugucaauugaaguuauuauguguuuuguuucccuucuuucu

SEQ ID NO: 395471 - RNA, 84 nt, Homo sapiens
cacccaucuauccaaaguuguuuucacugacugcaaauccauugguugggucaauugcuuaugaagauacaugacaaaagggug

SEQ ID NO: 395472 - RNA, 92 nt, Homo sapiens
gauaauacauguaacauguuuagcagauaccugucugacauuuacugugugcucaauagguguuaguuaauguuauuauuaauguuauuauu

SEQ ID NO: 395473 - RNA, 73 nt, Homo sapiens
agcagauacuuuugaggagccuucauugcaaggaccugagacucccagugaacacagcuucuuugguucugcu

SEQ ID NO: 395474 - RNA, 64 nt, Homo sapiens
ugagguggcuggaaaguuacaaaguaucuggaagugcuuuguguggacauuucaggcagccuca

SEQ ID NO: 395475 - RNA, 71 nt, Homo sapiens
gccuuuggagucugacuuauaggaaccuucuggguucugcccagguuacuagcaggucagaaucuuggggc

SEQ ID NO: 395476 - RNA, 58 nt, Homo sapiens
cuuugcauucacuguaugcaugacauacuacugucuuauagugcaaugaauagcagag

SEQ ID NO: 395477 - RNA, 58 nt, Homo sapiens
gucucuaaguaaacuugaaaggcauuguaggccauaaggauuucaagucuuaggugac

SEQ ID NO: 395478 - RNA, 86 nt, Homo sapiens
guauucgguuggugcaaagguaauugugguuucugccauugaaaguaaaggcaagaaccucaauuaccuuugcagcgaccuaauac

SEQ ID NO: 395479 - RNA, 65 nt, Homo sapiens
guauuucuaguucuagauccuugaggaaucaccacacugcuuccacaaugguugaacuaguuuac

SEQ ID NO: 395480 - RNA, 59 nt, Homo sapiens
cugacugagccugugcagucacacaccugugaagucauuucugcaagguaauaggucag

SEQ ID NO: 395481 - RNA, 69 nt, Homo sapiens
ugagcaucauggggccaaagcgcaagcacccuccuagcagggcagagcgcuggcaccacguggagcuca

SEQ ID NO: 395482 - RNA, 57 nt, Homo sapiens
augucuucuuuggagaagugucuguucauauccuucgcccacuuuuugaggaggcau

SEQ ID NO: 395483 - RNA, 56 nt, Homo sapiens
gcagguagggucuggcuggggaacuuggggcccuucaacagguagacccucccugc

SEQ ID NO: 395484 - RNA, 60 nt, Homo sapiens
auggacuuggaagccauuauucuaagugaaguaacucaggaauggaaaaccaaguaucau

SEQ ID NO: 395485 - RNA, 83 nt, Homo sapiens
ucuuuaaagacagcaguggugucuuguuuaauauauaucucuggugccugguauauagcaaacacucauuagauauuugaaga

SEQ ID NO: 395486 - RNA, 130 nt, Homo sapiens
gcauccugagagccuuggaagagggaacagauuugaggcacuguccugacagucacccuggugcagucaguggagagcuuccaggauucauaucccuauaacccagggccacacuucucaacccugaugc

SEQ ID NO: 395487 - RNA, 64 nt, Homo sapiens
cagucaagguguaggaguaaagaagucaaauauuuaugugugauuuauagcuacaucuugacug

SEQ ID NO: 395488 - RNA, 58 nt, Homo sapiens
gugacggcagcacugagcugugauagaccccuugcugacuagcucaguguuugcuuac

SEQ ID NO: 395489 - RNA, 57 nt, Homo sapiens
guccaagagcauggcaccagcguccggcaagggcuucgugcugugucaucuuguggc

SEQ ID NO: 395490 - RNA, 90 nt, Homo sapiens
ugauuuuuuguggaccuguauaauuguacauauuuaugguauacacagugauauuuugauauguguaaacaauguauaauggucaaauca

SEQ ID NO: 395491 - RNA, 87 nt, Homo sapiens
ggccaggcacaguggcucagaccuguagucucagcaggccuauaugggcagauaaccugagguuaggaguuugagaccagucuggcc

SEQ ID NO: 395492 - RNA, 81 nt, Homo sapiens
gggaggcauuucuaucacccauugcacaaagagggaaacugaggccagagagggcacuugcuuccucugugcaauccuccc

SEQ ID NO: 395493 - RNA, 66 nt, Homo sapiens
uagaauacuauccaauugccacaagaaaugaacuagauguauauauggcaacauggauggauucug

SEQ ID NO: 395494 - RNA, 75 nt, Homo sapiens
aaucaggacauguuccuuuucaucuuugccucccauaauuuucuuugguagaggucuuaucaaacaugcuugauu

SEQ ID NO: 395495 - RNA, 77 nt, Homo sapiens
ucgcuugaacccaggaggcagagguugcagugagccgagaucgcgccauuguacuccagccuguggagcaagagcga

SEQ ID NO: 395496 - RNA, 82 nt, Homo sapiens
auaauauuccauugucuagauguaacacaguuuauccauucaccuaaggacaugcuguuugcauccagguuuuggcaauuau

SEQ ID NO: 395497 - RNA, 57 nt, Homo sapiens
ucuugccuuugucuucaaaggcucugccaaugugaaguacaggagagagaggcaaga

SEQ ID NO: 395498 - RNA, 101 nt, Homo sapiens
aaaccugaggggucaagagguuaaauagcuugcugaaaauuaguggguauuuaacauacccauuguuaaguugaguaucuaacuuuuacccaacucuguuu

SEQ ID NO: 395499 - RNA, 66 nt, Homo sapiens
aguuucaagaccuaugugaagaaucccuuucaaaaguuacaugguucuuauauaguuucugaggcu

SEQ ID NO: 395500 - RNA, 58 nt, Homo sapiens
ugaaauggaaagaguguagacuuugggcacagaagucugaguuuuuaauuuuauuuca

SEQ ID NO: 395501 - RNA, 64 nt, Homo sapiens
auugugaauagugcugcauuaaacauacgugugcaugugucuuuauaguagcaugauuuauaau

SEQ ID NO: 395502 - RNA, 57 nt, Homo sapiens
aauuugucacuauaaauaagcauuuaguuauaaaacaaguguuuauggugagaaauu

SEQ ID NO: 395503 - RNA, 83 nt, Homo sapiens
uuggauagaaacauuucauagaugagcaccugucaauggaucacacuuugaguagaacuagucuagagcuuguuuuucuccaa

SEQ ID NO: 395504 - RNA, 89 nt, Homo sapiens
uuagggagauagcaaaauggcagcugguuuuacccuagaagaccucuuacuagauaaauuccagcugugaauauaugauguuuccuuaa

SEQ ID NO: 395505 - RNA, 87 nt, Homo sapiens
cagguccugaaggcuggggcuggcaagaugcugaugcaaccagggaaguggggcaacagaccucucugccacccagcccagagccug

SEQ ID NO: 395506 - RNA, 88 nt, Homo sapiens
agguauucuagccaccuuuuuaaagcacuuauccaacuguaauuaaauaaauguguaauuaguuggcugggugcgguggcccaugccu

SEQ ID NO: 395507 - RNA, 95 nt, Homo sapiens
agguguaaaagugauauugugauuaugguuuuuagcagaguaauuaucuguaagaauugcgugcugaaacaugacagaaaucugguagcucaccu

SEQ ID NO: 395508 - RNA, 76 nt, Homo sapiens
guucauuucuggaaguuuuuauuuaauauucucaaacugagguugacugugguaauggaagcugcagaaagugaac

SEQ ID NO: 395509 - RNA, 70 nt, Homo sapiens
agguucggauugccaguauuuuguugaggauuuucgcaucgauguucaucaaggauauuggccugaaguu

SEQ ID NO: 395510 - RNA, 88 nt, Homo sapiens
gaagaggauggaguguggaagucuuugguauugguagucuuaucucagauuuauuguggcuagaauuuuuaccuacuucaugcucuuc

SEQ ID NO: 395511 - RNA, 61 nt, Homo sapiens
gcccaggcaugguuaaagcacuuugagugguuuguaugccugaaguguaaccgugcagggc

SEQ ID NO: 395512 - RNA, 59 nt, Homo sapiens
uccccaaauuguguuucaaggggcucugcugcuccacaguuugacagcacaugugggga

SEQ ID NO: 395513 - RNA, 93 nt, Homo sapiens
uugucaucaucuagcagaacaauacaauucgguugccggggcuuuuccuuccuguccugaguugaauugugucucucccaaaagauaugauga

SEQ ID NO: 395514 - RNA, 73 nt, Homo sapiens
agugcuuugagcauauuuaagguaugcuaggcaaagcuaugauguuuaguagguuagguguauucaaugcauu

SEQ ID NO: 395515 - RNA, 76 nt, Homo sapiens
caggacaguggggguggguuucuguugcuuuaagcccccgaguuugcuacagcagcccaguccccgaaccuuccug

SEQ ID NO: 395516 - RNA, 66 nt, Homo sapiens
cagacugucaugggguacuacacauggggggucagcacucccgugggucacucacauggggguuug

SEQ ID NO: 395517 - RNA, 78 nt, Homo sapiens
uugaguuaaugcugaaaugaguuaagacuuugggggauaguuaggaaggcaugacuaguuugaggacauuauacucaa

SEQ ID NO: 395518 - RNA, 82 nt, Homo sapiens
aguuuuaggguacaugugcacagugugcagguuaguuacauauguauacaugugccaugcuggugcgcugcacccacuaacu

SEQ ID NO: 395519 - RNA, 60 nt, Homo sapiens
aauauagcuauguacauguccauacagcaagaagacucugacaugugccaaugcuguauu

SEQ ID NO: 395520 - RNA, 63 nt, Homo sapiens
gggacuguuggguaggagaacugaaaacaccaagcauguuggcaucacauuacucaaaguccu

SEQ ID NO: 395521 - RNA, 69 nt, Homo sapiens
gguuugauaugggcuuuguuuuguacuagauauauaucucuaaggcauauuauaaagccauauuggacc

SEQ ID NO: 395522 - RNA, 73 nt, Homo sapiens
gcuuugugauguguaaauacaagugcuugaaauagucugaaguuccauacaaauguauuuucacaaaugaggu

SEQ ID NO: 395523 - RNA, 104 nt, Homo sapiens
ccccaucacgggauugucgacuucaucaaauccacaagaccccuuuucacugugaaguaauauagucacagguucuugggauuagaggaugaacaucucugggg

SEQ ID NO: 395524 - RNA, 71 nt, Homo sapiens
aagccuuuccacauucagcacacauauaggguuuuuccccaguaugaguuuucugauguguggugagguuu

SEQ ID NO: 395525 - RNA, 56 nt, Homo sapiens
agacacuggguguuuguuggcguucgggcugccagggccaucgaauccgguugucu

SEQ ID NO: 395526 - RNA, 70 nt, Homo sapiens
augagguaacagaagcgagcauuuccggggugcgccaugagccuggugaugcuguucacuguguucucau

SEQ ID NO: 395527 - RNA, 58 nt, Homo sapiens
ucacugugugucucuguaucugaaucucuuuucccuggucuuacaaagacaccaguga

SEQ ID NO: 395528 - RNA, 82 nt, Homo sapiens
aaaaggguuguccuuagauguggccuccagggauaguuaagcuguaaauggaaggcuucauauguaaagacauuuuccuuuu

SEQ ID NO: 395529 - RNA, 60 nt, Homo sapiens
uuucuaccaggagguguuauguuguuucccgaaguacuaauacuugcauccuuggagaga

SEQ ID NO: 395530 - RNA, 84 nt, Homo sapiens
uccucuucgauaaaguggauucauuuuauuucuaacucaugaaaauuaaauggagaugaaaugagcuacuuaauuaagugagga

SEQ ID NO: 395531 - RNA, 90 nt, Homo sapiens
cugagguuacucaggaagucagaggcagagcugcagucagggccaccucucuuuacugcuagcugugugcucuuucuacugcacccucag

SEQ ID NO: 395532 - RNA, 65 nt, Homo sapiens
cagaugagaguggccaggguucauggucaugcucacauccucccuggacacacacuuuuauucug

SEQ ID NO: 395533 - RNA, 77 nt, Homo sapiens
ucucaaucgugagcaccaggcaaaaccacaggagcaguaccauuguucuggagaguuuagucuggggccuacuggga

SEQ ID NO: 395534 - RNA, 56 nt, Homo sapiens
gugagaugugacuucugccucuauuagcacuuagaguugcacuauucauauuuuau

SEQ ID NO: 395535 - RNA, 64 nt, Homo sapiens
cucugcauuuaagaaagggagggaagagugaaaaggacucugucuugugguuugagugccaggg

SEQ ID NO: 395536 - RNA, 88 nt, Homo sapiens
aauaauucuggggauaauauugucaaaauggauuccacugcaaacaggcaguaggauuuacuuugacaauauucuccccagaauuauu

SEQ ID NO: 395537 - RNA, 59 nt, Homo sapiens
cuuagugaaugucacuggcuguuggacagcuuguugucuacacagggcaguucaaugag

SEQ ID NO: 395538 - RNA, 62 nt, Homo sapiens
ggagugcauaugggccugugucacucugucugccuggagugaauauggcccugugucacucu

SEQ ID NO: 395539 - RNA, 109 nt, Homo sapiens
gguaaggcugaaguaauagaaauaacuagaaaggagacaguugcuguuggaugcuucuuaaaagccuccuguugcacaccgucucucugguucuucugacuuucuugcu

SEQ ID NO: 395540 - RNA, 129 nt, Homo sapiens
gaagggcgacucaauuagacccaauugggguaagcaucacguagacuuuaccauuucaaagaaucuuuaaaacacggaaaguaguaguugaugugguguggauuuuaaggccagauuuuuugacccuuc

SEQ ID NO: 395541 - RNA, 73 nt, Homo sapiens
gagagaaggaagcuagcauuuguucagugacaaaucuaugucaagugcuuuacaaauuuuagcuuauugucuu

SEQ ID NO: 395542 - RNA, 76 nt, Homo sapiens
ggggaacagcuugggcucugccauuugcugacugcgugacccuggguggaugguucaguugcacaggcuguucucu

SEQ ID NO: 395543 - RNA, 75 nt, Homo sapiens
agucauugacgauaucaaggaaaugaagugauaaaauaaaguuucacuuuaagaaguuugauaugacaggagacu

SEQ ID NO: 395544 - RNA, 62 nt, Homo sapiens
agugaauugagcucaacacuaaucaauuaaauaguugacugguguuuaaugagucaaaugcu

SEQ ID NO: 395545 - RNA, 64 nt, Homo sapiens
gcuuuuagaaaaaguuaagguucuuaaaaugguuguuuucuaguuuuuagcuuuuauugaaagc

SEQ ID NO: 395546 - RNA, 67 nt, Homo sapiens
uuuucuccuguuaaucugucuuuuguuauugaggguuuagccauaaaccuagcaauggaugaggaaa

SEQ ID NO: 395547 - RNA, 122 nt, Homo sapiens
uuuagaaggguacuuugccugaaucuuaccuucaucccuagaaaaaucagcacaugggugcucaugugcucugccuguuuuuuagagaugauaaaugugaggugcaacaacuugccccuaaa

SEQ ID NO: 395548 - RNA, 59 nt, Homo sapiens
uuacuuugcuucaggaagaggaaguaacaaggcauucuuccaucccugagcugaagugg

SEQ ID NO: 395549 - RNA, 86 nt, Homo sapiens
uuggcagaggugugauguggagggcagauccagggcuuccaccacaggcuggauguuucugcccccuacuuacacauauauguuga

SEQ ID NO: 395550 - RNA, 74 nt, Homo sapiens
gauguuuauugcuaacugaaauaagaccagcaaugaacaguccgaggcugguacagcagcuuagcaauagcauu

SEQ ID NO: 395551 - RNA, 71 nt, Homo sapiens
uacauauauaacguaaugaggugauggauaugcuaauuacccuuauguaaucauuauacauuauaugugug

SEQ ID NO: 395552 - RNA, 55 nt, Homo sapiens
ccuacggaaauaccacaacugaaaucaaaagauuuggacugugagguuucguggg

SEQ ID NO: 395553 - RNA, 82 nt, Homo sapiens
guuacaguuuuguaccaucaucugguuagugccuuaggauaaauuucuagcagucucagaaugcaugguuaaaagaguauac

SEQ ID NO: 395554 - RNA, 84 nt, Homo sapiens
gcaaaccaguuuaaagaauguuaugcuuucccaaucaauaaaaaaguggucagaaagacaggcauucagcuagcaaauguuugc

SEQ ID NO: 395555 - RNA, 91 nt, Homo sapiens
aaucuauccuggagaaucuucuaugugcaguuaugaagaaugcauagucuauagcuguugaauggaauauucuguaaccaucucuuagguu

SEQ ID NO: 395556 - RNA, 63 nt, Homo sapiens
cuauguguccauguguucucaucauuuagaucccacuuauaagugagaacaugugguauuugg

SEQ ID NO: 395557 - RNA, 70 nt, Homo sapiens
gucugugaguauauuugcacuguuaugugccagcaacugugcacauaacaacugguaugaucaauaagac

SEQ ID NO: 395558 - RNA, 69 nt, Homo sapiens
cuucacagucugggcuuguuuguaccuguccacaagaaaggcaaguacaaacaaacccagacugugaag

SEQ ID NO: 395559 - RNA, 81 nt, Homo sapiens
cugucuaaacuuuuugaagugcugugggccaggcguguuggcucacgccuguaaucccagcacuuugggaggcugaggcgg

SEQ ID NO: 395560 - RNA, 67 nt, Homo sapiens
uuaugugccuuuuugccauucauaugucauauuuaagacgauauaugaauggcaaaaaggcacauaa

SEQ ID NO: 395561 - RNA, 66 nt, Homo sapiens
gauguugagcacauguguuaagggguacuuuguuugaaauaccuuauugcuuagugugccaauauu

SEQ ID NO: 395562 - RNA, 82 nt, Homo sapiens
cacuauacacuguuggugggaguguaaacauacuguuuucuacuaugguugaacuaauuuacacucccacaguguauaagug

SEQ ID NO: 395563 - RNA, 57 nt, Homo sapiens
caaaugacuacuuuuuggaauuauuuuuccccccuggaaaguucccaguggcauuug

SEQ ID NO: 395564 - RNA, 58 nt, Homo sapiens
ugagacggagucacgcccugucacccaggcuggagugcaguggcgcgaucuccgcuca

SEQ ID NO: 395565 - RNA, 95 nt, Homo sapiens
cuaaucaaucagcaggagcagccuagagagccacuuugagaagaauucugaggcugucucugggcuccacuugaaaucuuaucuugauugauuag

SEQ ID NO: 395566 - RNA, 57 nt, Homo sapiens
cuuucuccaaucuaagggaagaaggccugguuuuuguauguuggagauuggagaagg

SEQ ID NO: 395567 - RNA, 60 nt, Homo sapiens
acaucuguacagugggugugguagcucccaugaucuucaggggccacaccacucagaugu

SEQ ID NO: 395568 - RNA, 80 nt, Homo sapiens
ucuuuguuguguuuaguuuaucagugguuucugaagucuccaaguuuuuuagauaguggucagcuaguguuuggcagaga

SEQ ID NO: 395569 - RNA, 102 nt, Homo sapiens
auggaaaguggcuguggaucugggugaaucagugagugguuagugaaugugaaagccuaggacaucacuaucuacuacuguagacuuauaaacacuguauau

SEQ ID NO: 395570 - RNA, 82 nt, Homo sapiens
aagauuauugguuuauauggguuuuauauuaggcucuuagauauaaaaaggaguuugacagagcuuauguagccuuaguuuu

SEQ ID NO: 395571 - RNA, 72 nt, Homo sapiens
uuaguaguagugcuguaauuuuuauaaagauauauuugcagcaguguaggaugaauuauagcacugagcuag

SEQ ID NO: 395572 - RNA, 55 nt, Homo sapiens
gauaccaaagaggaggccaagaagcggacuguggcuuggugaccuguuugguauu

SEQ ID NO: 395573 - RNA, 66 nt, Homo sapiens
gggacugagauggagacuuggccuuaaaucagacccuugauuucucccccuucuccagucuuuccu

SEQ ID NO: 395574 - RNA, 73 nt, Homo sapiens
gaaagcaacagagugcauguuuagaugagugaaucaauuucacuuuugaucugugcaauucaguuaacuuuuc

SEQ ID NO: 395575 - RNA, 74 nt, Homo sapiens
ugcucgagcacgggaggucgagguugcagugagccaggauggugccacugcacuccaucuuagguggcagagca

SEQ ID NO: 395576 - RNA, 71 nt, Homo sapiens
gauucauguugacagaauuuacuuuacaaggaugauuuuccuuuguaguguuuauucugucaacagguauc

SEQ ID NO: 395577 - RNA, 99 nt, Homo sapiens
acaaacgguuccuggccuuguaaauaccaguuucuggaacagaguuucugaauuucugucuuagaaauuauguauuuaauaaaugugagaauaauuugu

SEQ ID NO: 395578 - RNA, 67 nt, Homo sapiens
guguaagcauugaaagagauaaagccuuuuuuuaaaagagguguuaaagucucuuuuaaucuuauau

SEQ ID NO: 395579 - RNA, 85 nt, Homo sapiens
ugucugugguacccuacucuggagagugacaaucauguauaauuaaauuugauugacacuucugugaguagaguaacgcaugaca

SEQ ID NO: 395580 - RNA, 56 nt, Homo sapiens
agcauuaguugugaagccuuuauuacauguauugaaguuuucauacagacuaugcu

SEQ ID NO: 395581 - RNA, 78 nt, Homo sapiens
cuguauuuacacaaaccuagagguagccuacuacacaccuagaauaauaggguauagccuguugcuucuaggcuacag

SEQ ID NO: 395582 - RNA, 76 nt, Homo sapiens
ucuguugaagaggcaguaauuggaagagcugagaucugaacacaugcuuuuccaguuggaaagccuguuuucuaga

SEQ ID NO: 395583 - RNA, 71 nt, Homo sapiens
ugggagguauggucuuugagaggugacugagucaugaggacucuucuuucaagaauggauuaggucucuua

SEQ ID NO: 395584 - RNA, 60 nt, Homo sapiens
guauauccguacaaggggauauauccauauccauauccaugucccuuuguauggacauac

SEQ ID NO: 395585 - RNA, 66 nt, Homo sapiens
uagauucccucuucuggacccaaggacccaaguggggauucuuugggauauucugaaagggaacua

SEQ ID NO: 395586 - RNA, 71 nt, Homo sapiens
cuucagaaucuaugugccagcuccaaauagucugcuuacugcaccuggagcuagcauuuagacaucuggag

SEQ ID NO: 395587 - RNA, 129 nt, Homo sapiens
aagugcugggauuacaggcgugagccaccacgcccggccuacagucuuuuuucuauacacuuaagaaaacaaaguuagaagacuauucuggguugggcgcgguggcucacgccuguaaucccagaacuu

SEQ ID NO: 395588 - RNA, 90 nt, Homo sapiens
uugguggcacacaccuguugacccagcuaggagacugaaauccuccuaucucaguccccucgcugagucuacagguaagugugucaucaa

SEQ ID NO: 395589 - RNA, 106 nt, Homo sapiens
gacaugcugcugaauucaguuugccaguauuuuguugaggauucuugcaucgauguucaucaaggauauuggccugaagauuucauuuuuuuguuguuguuguguc

SEQ ID NO: 395590 - RNA, 113 nt, Homo sapiens
uuuagauggacuacagugaaaagaaaucacuagguaguaaucugcagagaaagccauucucuuuuauccuaucuuugcauuuccucuuaguuucugcacuaguuauaucuaga

SEQ ID NO: 395591 - RNA, 68 nt, Homo sapiens
agggauagaggaauaugugccaagcaaauagaaagcaaaaauaagcaggggauguaauccucaucucu

SEQ ID NO: 395592 - RNA, 90 nt, Homo sapiens
cauccuccuggcauaugaggaguauaacccggugaguauucccggcagugagguucccgggccauauuuccauauugacaggagugggug

SEQ ID NO: 395593 - RNA, 69 nt, Homo sapiens
gggaacuggaguaaaugucacuguugcugugcuuuagcaaagagacugguggcauuuugccccuguccu

SEQ ID NO: 395594 - RNA, 79 nt, Homo sapiens
acauuuuagcaccaaacauauacucagucagcaccagagacugcucacuagagaagaguguuaugugugcugugaaugu

SEQ ID NO: 395595 - RNA, 79 nt, Homo sapiens
ugaacuguaucuuaaaggcuucggaucagaagguaaaacauuuuacuuuaauauaugugaaguucugagacucaacuca

SEQ ID NO: 395596 - RNA, 56 nt, Homo sapiens
ugucaugucuuuguguaucaauuacuaauccauagguugaugcaaaagucauugca

SEQ ID NO: 395597 - RNA, 129 nt, Homo sapiens
cuggcugagaccugucaccauuugaguuugugaacucugaucuacguaugaaguucuacuggcuccgaggagcugugauucuguguagauagucuugcauacugcuaaaauagguuuuuuacuuuccag

SEQ ID NO: 395598 - RNA, 116 nt, Homo sapiens
uugccuccagauggcuuuaggggccaugcagagggcagugguagguaugagggagccagcggaggcuucuuuggaggcgaucuguuugaugugauacggucuguggauggaggcag

SEQ ID NO: 395599 - RNA, 109 nt, Homo sapiens
guaacuugaccaagagaucacacagcuuguaagggguagagccuggauucuaacucaggcaagcugacuuacaguccaugcauuauccuccacaaaaugcucagguuac

SEQ ID NO: 395600 - RNA, 82 nt, Homo sapiens
guagaguauguaagugguucuuuaaguauuaaacaauugguucauauuugaauacuucguucaaagauaacuucaggcucac

SEQ ID NO: 395601 - RNA, 79 nt, Homo sapiens
accuacgguauagauuguauccuaggagugaaacccaagacauguaaccuaggugugcaguaggcuauaccaucuaggu

SEQ ID NO: 395602 - RNA, 55 nt, Homo sapiens
cugccuuggaaaaugugguaauuaaaaagugcuuuaauauaacauccaggagcag

SEQ ID NO: 395603 - RNA, 56 nt, Homo sapiens
uugcauuguacuugguacggcugagggaagucuguugcccagcucuugcaaugcag

SEQ ID NO: 395604 - RNA, 56 nt, Homo sapiens
gucagcuuuuccuuacuuuaggacaugcucauuuguucuugaguuccaaaacugac

SEQ ID NO: 395605 - RNA, 87 nt, Homo sapiens
gagcauuuggcccauuuacauuuaagguuaguauuguuaugugugaauuugauccuguccuuaugauguuagcugguuauuuugcuc

SEQ ID NO: 395606 - RNA, 58 nt, Homo sapiens
cucacacugucuucauuacuguagcuuuguaauaggcuauaaaaucaggcagugugag

SEQ ID NO: 395607 - RNA, 59 nt, Homo sapiens
guucuauguugggaguucacuauaaguaggaguucucuaaaagcacuuccacguagaau

SEQ ID NO: 395608 - RNA, 74 nt, Homo sapiens
ucagaauuggaacugaaauaauaacuucaaagaaaagaaaacuuacuaagguuauauuuguaguucaguuuuga

SEQ ID NO: 395609 - RNA, 64 nt, Homo sapiens
auugugaauagugcugcaauaaacauacgugugcacaugucuuuauagcagcaugauuuguaau

SEQ ID NO: 395610 - RNA, 90 nt, Homo sapiens
aguucuuuuucagccgggcaugguugcuuauuccuguaaucccaguauuuugggaaacugaggugggcagauugccugagcucaggagcu

SEQ ID NO: 395611 - RNA, 113 nt, Homo sapiens
gugaaugaaggcaaauagggauguugcauuugucaaggucaagcaaagacagaaacaguuuuaucuugauguacuuaauaagugccaauaucuuaauuuccuaacucauuuau

SEQ ID NO: 395612 - RNA, 93 nt, Homo sapiens
uucuggauuuuaaugacucagaacuaaggguguuucugcaaaguaauggaauauagcaggacuauucuagucugaguauaaauagaauaagaa

SEQ ID NO: 395613 - RNA, 68 nt, Homo sapiens
uccacuagaguaaaugauacacauguuuauuugagcccuaaucugccauggugucuuauuuuugugga

SEQ ID NO: 395614 - RNA, 87 nt, Homo sapiens
uaucuaucuugauaaguuagugugagaauuuugcgugguuguauaaagggccuggcacauaguaacuucucaauuugugauagcaua

SEQ ID NO: 395615 - RNA, 70 nt, Homo sapiens
gacugugaaaugcaagguauauucaugagagaacugcgacucucacaugaagauuuuaguauacacgguu

SEQ ID NO: 395616 - RNA, 68 nt, Homo sapiens
uugcuugagccugggagguggagguugcagugagcuaagguugcaccacuacaccccaggcugggcaa

SEQ ID NO: 395617 - RNA, 90 nt, Homo sapiens
cuuccgcuguaauucauuuacugaacacccacuaggugcuaaggaccaagccagguggugguauuucagaaaaugaggacacauuugaag

SEQ ID NO: 395618 - RNA, 61 nt, Homo sapiens
aaguaugucuugagacauacuugagacuggguaauuuauaaguauguaucaagucauacuu

SEQ ID NO: 395619 - RNA, 61 nt, Homo sapiens
cacaguguucauagccaucaggaacuuggaaaacaaacuuuggugaaugcgagcaacugug

SEQ ID NO: 395620 - RNA, 76 nt, Homo sapiens
uaugucagagagaagauuuggugcucaaaggccgcuguucagauucuuuugucccauggggucuuccuuugaugua

SEQ ID NO: 395621 - RNA, 96 nt, Homo sapiens
cauuauguuuuauaaaaauuuucuauuaucuagaaauuucagcagauuggcaguuggaaguauagauaauugaaaguggguacuauaauaguagug

SEQ ID NO: 395622 - RNA, 84 nt, Homo sapiens
uucucagcuugacuuuucccuuuagcuuagugauuuuggggcacucaaggaacacugcagacagaggggcacguuuugugggaa

SEQ ID NO: 395623 - RNA, 80 nt, Homo sapiens
guaauguuauguuauguuauguuauguuauguuacguuacguuacguuacguuacguuacguuacguuacguuacguuau

SEQ ID NO: 395624 - RNA, 81 nt, Homo sapiens
ggggccgccccaggcgugaggccugccggggugacgacaucugucacccgugcucacugccucugccuugggucccgcccc

SEQ ID NO: 395625 - RNA, 83 nt, Homo sapiens
ugggcuaauaaauagagauaucaauuucauggugaucgucacugaucuuuacuuuaaaaacugauaauucauuuuuugguuca

SEQ ID NO: 395626 - RNA, 78 nt, Homo sapiens
ugguuuuuguuguugguucuguuuauaugcuggauuaugacuuuugauuugcauauguugaaccagccuugcauccca

SEQ ID NO: 395627 - RNA, 55 nt, Homo sapiens
uauggcugcuuucacacuacaaccauggaguuguguaguugugacagagaccaua

SEQ ID NO: 395628 - RNA, 87 nt, Homo sapiens
ucccuggagauguacgagagcauuaagccaucaucauucacccaugauacauuuaccuauggucuugaucggcucucccaucuugga

SEQ ID NO: 395629 - RNA, 72 nt, Homo sapiens
uggguauauuguaugaugcugagguuugggguaugguggauuccauaacccagauacugagcauagcaccca

SEQ ID NO: 395630 - RNA, 87 nt, Homo sapiens
gcuuuucuuuauggauagugcuuuugaaucuuguugaagaaauuuuucaacagaguucucgaagauauuuuccauuauuguaaaagu

SEQ ID NO: 395631 - RNA, 122 nt, Homo sapiens
uuuuccucucuuaccugcuuaucguguaacauaagcuguauugacuuuguaucauaguauuuaaguauuguuaccuuucugucauauacuuaagcuacaggaucucaaggugaagaagaaag

SEQ ID NO: 395632 - RNA, 58 nt, Homo sapiens
ugagcugagaucgcgccauugcauucuagccugggugacagugugauacuuagucuca

SEQ ID NO: 395633 - RNA, 60 nt, Homo sapiens
aauccuaauuccuaaugugauguuucuuagagguggagcccuucacagguaauuaggauu

SEQ ID NO: 395634 - RNA, 55 nt, Homo sapiens
agucugugguacuguguuacggcggcccaagccaacuagcacagggucccagacu

SEQ ID NO: 395635 - RNA, 68 nt, Homo sapiens
gccuggucaacauggcuaaaccccaucucuacuaaaaauagaaaaguuagccggguguguuggcgggc

SEQ ID NO: 395636 - RNA, 63 nt, Homo sapiens
gaggucagauuuccuugcaguuuggaacuuccuuggaauuccauaguacuagaaacugaccuu

SEQ ID NO: 395637 - RNA, 75 nt, Homo sapiens
uugcuugaacgucagaggcagagguugcagugagugagauugcgccacugcacuccagccuggacgacagagcga

SEQ ID NO: 395638 - RNA, 129 nt, Homo sapiens
accuuggagcucacagcauugucuugguugggggaccaugugggcggcagguccuggcugugcucgcuccccacccugucauccacauggugcucugucgggggccuggggcaugcugcccuccagggu

SEQ ID NO: 395639 - RNA, 87 nt, Homo sapiens
ugcagauagacgccuucuugcuguauccucacauggucgagagaugaucuguuuuccaugugaggauaucacaaguucucucuugca

SEQ ID NO: 395640 - RNA, 72 nt, Homo sapiens
uuguuuuggagaugagcuaaaaggacacuuuauauuuuccccuauccaacacaagcguuaucuucagaacaa

SEQ ID NO: 395641 - RNA, 76 nt, Homo sapiens
ucgcuugaaccugggaggcggagguugcagugagccgagaucgcgccauugcacuccagccuggcagcaagagcga

SEQ ID NO: 395642 - RNA, 63 nt, Homo sapiens
gucugucauggauucugagucugggcguccgcuguugcccaggcuggagugccguggcuggau

SEQ ID NO: 395643 - RNA, 60 nt, Homo sapiens
uaguagcagcaauuuacuccauacuucaguucugcugugugguuuggaauuuuguuacua

SEQ ID NO: 395644 - RNA, 79 nt, Homo sapiens
ggguuuuugaggaauuggucuauuaaaccuaaguuuuaaaauuuauguguguagaguucaaaguauuuccuuauuaucc

SEQ ID NO: 395645 - RNA, 83 nt, Homo sapiens
ugaaacuauaaaacuacuagaggaaaacuugaagacaaugaaugcuucaggacaucacucuaggcaaagauuuuaugaauuca

SEQ ID NO: 395646 - RNA, 78 nt, Homo sapiens
gugucuuuauuagcagcaugaaaauggacugauacaguaaauugguaccaguagagugggguguugcugaaaagacac

SEQ ID NO: 395647 - RNA, 68 nt, Homo sapiens
ggguacacgugcccaacaugcagguuuguuacauauguauacaugugccauguuggugugcugaaccc

SEQ ID NO: 395648 - RNA, 88 nt, Homo sapiens
ucucuaucaccuuccuugggaaugcuaaaccucuauuuucucaugcauaaauggggauauuagcacuucccucauaggucagugggga

SEQ ID NO: 395649 - RNA, 88 nt, Homo sapiens
ucuauugaagucaccaaggccugggcugugcaucucugaaaggaaagcccuuugagaucaaugccuauggcuuucaagcaucgcugga

SEQ ID NO: 395650 - RNA, 56 nt, Homo sapiens
ugggaggcggaggcugcagugagccgagauuacgccacugcacuccaggcugccca

SEQ ID NO: 395651 - RNA, 93 nt, Homo sapiens
aggagaguaugaugugugaaaggugaaagauuaaaccagugugucuuacugacagauugcaagauuuuuuaucaaucagcauguauuacuucu

SEQ ID NO: 395652 - RNA, 65 nt, Homo sapiens
augagauuugggaggggccagucggggaaugauaugguuugccuuuguccccacccaaaucucau

SEQ ID NO: 395653 - RNA, 57 nt, Homo sapiens
cagaugcaugaccugggcuuggccaaugggguacagccacauaggauuuugcaucug

SEQ ID NO: 395654 - RNA, 73 nt, Homo sapiens
ggugguggggucguaggugcccgccagguaguagagguccugccgguccuggcacuugcggcuccgggccauc

SEQ ID NO: 395655 - RNA, 88 nt, Homo sapiens
gcuuauaaccugggaaggggaaaguugagcaaauauuauggaagaaaaggaaauauagcacugcaauauuucccugacagcugugagc

SEQ ID NO: 395656 - RNA, 65 nt, Homo sapiens
ugcauaaagcacuuuuuucugcauggcauaagacaauggucgucucaaggaaaagugcuuuugca

SEQ ID NO: 395657 - RNA, 76 nt, Homo sapiens
aguuuaccuacauaguuaaguaacaaacucaagaaaugaauuuggcaauuugacuguauaggccauugaaugaacu

SEQ ID NO: 395658 - RNA, 96 nt, Homo sapiens
cucuguggcccaggccggagugcaauggcgcaaucucggcucacugcaagcuccgccucccggguuugugccauucuucugccucagccuccagag

SEQ ID NO: 395659 - RNA, 72 nt, Homo sapiens
ugaguuggaauguauugcuacuucuucgaaucuuggaagaguuuguguagaauugguauuauuucuuccuua

SEQ ID NO: 395660 - RNA, 121 nt, Homo sapiens
gacuaugacaguuuucagacugcuuacuguuuaugacauugacaguuuuuaggaauacuggccaagaauuuuuuuauaaugcucaucacuugaaguuuguuugauauuuucucucaugguu

SEQ ID NO: 395661 - RNA, 56 nt, Homo sapiens
gcaaugcaaagcagugauuuuaccaugaaacacacaaaaucauugcacugucuugc

SEQ ID NO: 395662 - RNA, 85 nt, Homo sapiens
acauuagaaagaccauuuaucaugacuaaguuguauuuaucccagagaugcaaggaugguuagauauaugcaaaucaaucaaugu

SEQ ID NO: 395663 - RNA, 63 nt, Homo sapiens
uacuugaucaaugugguacuugaucaaugugauacucgaucaaugugguacuugaucaaugug

SEQ ID NO: 395664 - RNA, 87 nt, Homo sapiens
ggucugagcaggacaugaggucaugucgggccccaggacagcagccccuguccuaggcucggcccugacccaccuucucuggaagcc

SEQ ID NO: 395665 - RNA, 56 nt, Homo sapiens
ugauauguuagaaucuugcaagauguuacuaucuugccauauuauugagcauauua

SEQ ID NO: 395666 - RNA, 65 nt, Homo sapiens
cuuuuucccuuugaauuggaaagguguuuuuuagacaccuuggagucuagugcagaggaaaaaag

SEQ ID NO: 395667 - RNA, 85 nt, Homo sapiens
ugcuuguggagugagagaugaugugguagaaaagaagcugcauucauucauucauuuauucauucauuugcucacuccacaagua

SEQ ID NO: 395668 - RNA, 72 nt, Homo sapiens
cagguggaggucauuggaucaugggggugguuucucccaugcuguucucaugauagugagugaguucuccug

SEQ ID NO: 395669 - RNA, 59 nt, Homo sapiens
uguauauucgcacagauguagagaaauuaaaauccuccuacacuacugguggaaaugca

SEQ ID NO: 395670 - RNA, 64 nt, Homo sapiens
uuuaguuugccaguauuuuguugaggauuauugcauugauguucaucaagaauauuggccugaa

SEQ ID NO: 395671 - RNA, 78 nt, Homo sapiens
cauguguguguaugcacaugugccugggugugugugucugugcaugucccugggugugugugcaugcaugugugcaug

SEQ ID NO: 395672 - RNA, 95 nt, Homo sapiens
gccacucugacaggugugagauaaugucucauugugguuuugauuugaauuucucuaauaaucagugaugagcuuuguuucacaugcuuguuggc

SEQ ID NO: 395673 - RNA, 56 nt, Homo sapiens
cacaacacugcaugucuagcuccauggcugaguccaggcaagacccaaagugugug

SEQ ID NO: 395674 - RNA, 82 nt, Homo sapiens
caccgggaugcuaaguagcagaggcaagacuugaaccaaggaugacuugagucuaaacucuuugcuauuaaauccccuggug

SEQ ID NO: 395675 - RNA, 57 nt, Homo sapiens
uggaaaugggugggcagaaaaaaguggaacuaccaacuucuaguacuucuguuucca

SEQ ID NO: 395676 - RNA, 71 nt, Homo sapiens
ggcagugguguugccuguugaccuagggcauaccuaagcaucaccugggaagcaguaggcauaccauggcc

SEQ ID NO: 395677 - RNA, 76 nt, Homo sapiens
uuuaagagcacagugaacaauauccucuguucugcaucggcaaucacgauagaggguugucaccugaguccuugag

SEQ ID NO: 395678 - RNA, 85 nt, Homo sapiens
guuuuaacccuguguuauguucuacuuuuaggugcuuggugaagcagcauuuacuuguuaagcagagcaugggacgguugauagc

SEQ ID NO: 395679 - RNA, 56 nt, Homo sapiens
cucucuuggagaguccaucaucacugucccaguugagccaugggacuccaagggag

SEQ ID NO: 395680 - RNA, 66 nt, Homo sapiens
ugacucagauagguguguauucucaagaagcuuucauucuaaugacacauacuuugucuccaguca

SEQ ID NO: 395681 - RNA, 79 nt, Homo sapiens
ucugaggaaaauuaugagacaguucccuuuaucuuuaguacaacugaaguaaaagaaugacuuuuugauaauucccaga

SEQ ID NO: 395682 - RNA, 86 nt, Homo sapiens
auguuucuauggaucuuucugcuuuugaauuacauggccugaaaaugaaguaaucugaaagcuaggaguucucaugcauaaaacau

SEQ ID NO: 395683 - RNA, 87 nt, Homo sapiens
gacucgccuugccauagaagauuuauggcuucuuccuuaccaggcauuuggugguaagaggcccugaguuuguauauugccagaguc

SEQ ID NO: 395684 - RNA, 59 nt, Homo sapiens
auaaagccaugagcuugagaugguguacuugaaaggaccguuucaagaucagguuuuau

SEQ ID NO: 395685 - RNA, 60 nt, Homo sapiens
gagaggagguggcuaugacagcuaaaugucaucuuuuacuaucauggccauccucuucuc

SEQ ID NO: 395686 - RNA, 66 nt, Homo sapiens
uugcagauucguuuugagggguagaaguauuugcagucuaaccccgauacaaugaauuuuuugcag

SEQ ID NO: 395687 - RNA, 79 nt, Homo sapiens
gcuagggucaguuuugagaaagcgugcauccaauugugucaugcacagaauuuucucuuuacaaugaacuggacccagu

SEQ ID NO: 395688 - RNA, 84 nt, Homo sapiens
cuacuguggaacccaguagagauugccgaauugcucagcuaaacguuuucaaauccgugacucucuauuugguuauucagucag

SEQ ID NO: 395689 - RNA, 77 nt, Homo sapiens
uggauuuccuucagucucuucuaugacuucuaagacuuauauuucauagaagaacauagggugacugaaaccaucca

SEQ ID NO: 395690 - RNA, 99 nt, Homo sapiens
gaggcaggagaaccacuugaacccgggaaguggaggcugcagugagccgagaucacuccauugcacuccagccugggcaacagagugagacucugucuc

SEQ ID NO: 395691 - RNA, 91 nt, Homo sapiens
cacauaggauuccagagcacugcugcaggguucugaguguuuguccuucacauaacaauccagaacacugcugcuguguuccgagugugug

SEQ ID NO: 395692 - RNA, 63 nt, Homo sapiens
ggaaugacauuccacagccguagaggagccaggcuagccucagcccuguaggagugacguucc

SEQ ID NO: 395693 - RNA, 70 nt, Homo sapiens
ggccuugucaccuggggcacagcugaagacuuugcacagguuucuggucuauccuaggugaaugaugguc

SEQ ID NO: 395694 - RNA, 57 nt, Homo sapiens
aaccuguuuaccauguguuuuggguaugguugucuuauacaguauugugcacagguu

SEQ ID NO: 395695 - RNA, 56 nt, Homo sapiens
ugcuuuaucucuuuguuucacaguuggggcaucuagcaacaguuggaggugaggua

SEQ ID NO: 395696 - RNA, 130 nt, Homo sapiens
uauauguacguauacacgugcguauauguacguguacacgugcguauauguacguauacacgugcguauauguacguauaugcacguauauguacguauauguacauauaugcacguauauguacauaua

SEQ ID NO: 395697 - RNA, 88 nt, Homo sapiens
ggagaauugcuugaaccugggaggcaaagguugcagugagccgagaucaugccacugcacuccagcccgggugacacagugagacucc

SEQ ID NO: 395698 - RNA, 75 nt, Homo sapiens
acuuugguuuauagaauuuaggaaaagauaccugaccaagagaaacaggaaucauggaauucagugggccagagu

SEQ ID NO: 395699 - RNA, 55 nt, Homo sapiens
uaugugaaaugcaugaacacacagcuguacaugugugcacaugauauaucacaua

SEQ ID NO: 395700 - RNA, 82 nt, Homo sapiens
gguaucuuuauagcagcaccucacucuacugguaccaauuuacuguauuagucuguucucaugcugcuaauaaagacauacc

SEQ ID NO: 395701 - RNA, 66 nt, Homo sapiens
ccuucuucaugagacuuuuggaaggcuuuuuuuugguggaagccaaucauugaucaugaguugagg

SEQ ID NO: 395702 - RNA, 88 nt, Homo sapiens
guggggccuggaaguguggaagugucuggggccaggggccugaccacauggcaccuucuuuagagauuuuuaaccaauccauccuugc

SEQ ID NO: 395703 - RNA, 81 nt, Homo sapiens
guuacaggugcugacaugcagccacugcaccugcccugacauugggcagauggagcccugaugcucagauccaccagugac

SEQ ID NO: 395704 - RNA, 56 nt, Homo sapiens
uuaauuaaagcuacuuuaguguauaucaagugguaucucauugugguuuuaauugg

SEQ ID NO: 395705 - RNA, 127 nt, Homo sapiens
ucauuguuggauauuuggguugguucuaagucuuugcuauugugaauagugucacaauaaacauaccugugcauaugucuuuauagcagcaugauuuauaguccuuuggguauauacccagcaaugg

SEQ ID NO: 395706 - RNA, 117 nt, Homo sapiens
gaaggggucaggaguagagaacgggucugcugugcuuugagcagaggccagacucccaagucuggcuucugacuuaggggaccauccgcuucccaucuucccucucuuucuaccuuc

SEQ ID NO: 395707 - RNA, 100 nt, Homo sapiens
cacaguccuggaggcuggaaguccaagacuaggaguuggcaggguugauuucuucugagacugcucucuuugucuugcauguggccaccucccugcugug

SEQ ID NO: 395708 - RNA, 72 nt, Homo sapiens
gggaaguuuuacuuccggauugcugggguaucgauaagggaauuaaagcaaccagaggagaugaggcugccc

SEQ ID NO: 395709 - RNA, 56 nt, Homo sapiens
gaugauagcuuucagauuauauaguuuuuguuaaauauugucuuagaguugucauu

SEQ ID NO: 395710 - RNA, 87 nt, Homo sapiens
cuggguacugcauucaagugaugugauucuucuuuuuggguucugccaacaggaagcauugaacauaucacuuggcucaguaccuag

SEQ ID NO: 395711 - RNA, 76 nt, Homo sapiens
gugccuguagccagaggacuggcugguggaguggucauucucccugagcaaaguuuucuguacuuguaauagguac

SEQ ID NO: 395712 - RNA, 55 nt, Homo sapiens
ugcaaugucuucugaggggagcaaaauggccaugcacucuuaggaaauauaugua

SEQ ID NO: 395713 - RNA, 56 nt, Homo sapiens
gggacuagaggugaaaagaagaccaguaacauaccaguuuuucagcuucugguucc

SEQ ID NO: 395714 - RNA, 81 nt, Homo sapiens
aucauugccaucacuagaucauagguaaacacuacugaaugcuucagacgugauuaccugggaucuagugacggcagugau

SEQ ID NO: 395715 - RNA, 76 nt, Homo sapiens
ccuugaguuauuuugucaguaaaauaggucuuugugggcuagcacuggaucuauuucaugauaaccuucacugagg

SEQ ID NO: 395716 - RNA, 99 nt, Homo sapiens
gggauggaggggaacugguugcaguguuaaacaagguaggggucaauaugggcuuuaccugagaaggugacauuugagcaccuuaguuguccuaauuuu

SEQ ID NO: 395717 - RNA, 115 nt, Homo sapiens
acacugaauuagcaaagacugaaccuugguacuuugagaaauaugagauuagguuccuguuagggucuagucacauuuucaucaaauaaucaauacauagccuuguuuuaggugu

SEQ ID NO: 395718 - RNA, 68 nt, Homo sapiens
cuuguaaagcuguagauugcuaauuacuggaucaaaauuuuacauguggcaguuuacagcuuuaggag

SEQ ID NO: 395719 - RNA, 61 nt, Homo sapiens
gaucuuaugugugguggcauucacccuggcauggugggucaagaugcaaugcacugagguc

SEQ ID NO: 395720 - RNA, 87 nt, Homo sapiens
agaaaaauagcuucuacuggauaaauacuaauucgaauauuuuuaauguuuggaauuaagagauauuuucuagguugcuauuuaucu

SEQ ID NO: 395721 - RNA, 128 nt, Homo sapiens
aaccuccaugcuggauauaagcaaagaggagaggaaagaccuaugcaggaagaaaugaguucuucccuauguguuccuuccugcauagguauuuccccuccuuucuacucauauuuagcaugcagguu

SEQ ID NO: 395722 - RNA, 74 nt, Homo sapiens
uugacauccuuugugaaagccaacaacaagggucaauaguagcuuuuguaauccuauuccaaaggaauugucaa

SEQ ID NO: 395723 - RNA, 129 nt, Homo sapiens
ucaugguggauaaguuuuuugauaugcuguuggauuugguuugccaguauuuuauugaggauuuucgcaucaaaguucaucagggauauuggccugaaauuauuuugucguuguugugucucugccagg

SEQ ID NO: 395724 - RNA, 62 nt, Homo sapiens
aguguuaaauugaccacugagguagaaaacuaacaagaaauuuuggacuucaauuugacacu

SEQ ID NO: 395725 - RNA, 94 nt, Homo sapiens
cugcucugccuucugugcucagcaguuguuucggauugggagucaggaggccauucccacacuugaaacaaggcugcaagaggaggcugagcag

SEQ ID NO: 395726 - RNA, 61 nt, Homo sapiens
aaggcaccauaggcaaauccaggaugcucuccuuaugcccugauuguucuugcugggccuu

SEQ ID NO: 395727 - RNA, 76 nt, Homo sapiens
ccugacuccuauggaaaggggcaauaagaagcauaaauucuugucauagguauugcacuuuuccauaggagucagg

SEQ ID NO: 395728 - RNA, 84 nt, Homo sapiens
gugacugagcggugagugaaugugaaggcuagggcaguacuguauacuacuguagacuuuauauguacuguaugcuuaggcuac

SEQ ID NO: 395729 - RNA, 63 nt, Homo sapiens
uauugguguccuaugaaacaggauccacacgugaccaugggcuguggacagaggacaccaaua

SEQ ID NO: 395730 - RNA, 73 nt, Homo sapiens
gcaucacugggacuagagaugagauuuuucaaggcucucuucgugaaauauauuuuucugucugaguguaugu

SEQ ID NO: 395731 - RNA, 56 nt, Homo sapiens
cccaggcuggaaugcaguggcacgaucucggcuuacugcauccuccgccucuaggg

SEQ ID NO: 395732 - RNA, 70 nt, Homo sapiens
aagucuuugcuauugugaauagugccgcaauaaacauacgugugcaugugucuucauaguagcaugauuu

SEQ ID NO: 395733 - RNA, 63 nt, Homo sapiens
gaucaaacugcaaggcagcagcaaggcuaggggaggggugccugccauugcccaaguuugauu

SEQ ID NO: 395734 - RNA, 68 nt, Homo sapiens
ggcugccaguuugauucgggccacugugauauccuggccuaacagugcccugacacaccuggugugcc

SEQ ID NO: 395735 - RNA, 62 nt, Homo sapiens
uuccgcuguaguuguugguaccuugagcucagguucaccuugacucuaguaacugcuuggaa

SEQ ID NO: 395736 - RNA, 99 nt, Homo sapiens
gagguggggucuugcucuguugcucaggcuggagugcaguggugugauuauagcucauuuuagccuugagcucaugggcucaggcaguucuccuaccuc

SEQ ID NO: 395737 - RNA, 62 nt, Homo sapiens
cuuaaacaucccuaccugguagcucugaagagaacaauggaucuaccagcacaguguuugag

SEQ ID NO: 395738 - RNA, 82 nt, Homo sapiens
gaguuaaugggugcagcacaccaacauggcacguuuacauauguaacaaaccugcacguugugcacauguacccuaaaacuu

SEQ ID NO: 395739 - RNA, 78 nt, Homo sapiens
gagauuagacuguccagacccuauauaucauaguuacacaagcugaccccaugguauggaaggucuggaggacaucuc

SEQ ID NO: 395740 - RNA, 79 nt, Homo sapiens
cugugcaaaaauaaguugcuguuggucaaaccauccgauuuaugguauuugauuauagcaugcuuaggaacuaacacag

SEQ ID NO: 395741 - RNA, 64 nt, Homo sapiens
auugugaauaaugcugcaaucaacauacuugugcaugugucuuuauagcagcaugauuuauaau

SEQ ID NO: 395742 - RNA, 69 nt, Homo sapiens
cacuguccuaagcucuggagauacagucagaacaggaaagauaaaagcucugacuuggaguuuacagug

SEQ ID NO: 395743 - RNA, 94 nt, Homo sapiens
auaugcacauauuagguuggugcaaaaguaauugcgguuuuugccacugcuuuucauuaguuuugcaccaacuuaauaguuuacuauggcauau

SEQ ID NO: 395744 - RNA, 59 nt, Homo sapiens
uguccaggcagagguuugcuucaggggcuguauccucauggagaaccucugcuagggca

SEQ ID NO: 395745 - RNA, 114 nt, Homo sapiens
gaaauucgaaaacaaagagaacagcaagaaagauuucagcggugaguaguuugauguuuaaugacugugauauuuuucuucaaauauuuauuguuucuuuuuuuuaaaaauuuu

SEQ ID NO: 395746 - RNA, 70 nt, Homo sapiens
aagcugugcaugucugugacgacccuguguguaccugacaugggugagucuguacguguggucucggcuu

SEQ ID NO: 395747 - RNA, 96 nt, Homo sapiens
ggcacgacagcauaacaguaugagacugugagugagaaauaaccacaaagguucauuucucacucacaguccauguccacugugugcucuggagcc

SEQ ID NO: 395748 - RNA, 96 nt, Homo sapiens
ccaugacguacaucuuaaggaucauaguaaacauugauguggaagccauuuguuuuguaaucugguguggcugugauccucagaucugaaauaugg

SEQ ID NO: 395749 - RNA, 65 nt, Homo sapiens
gucauaugcucggaaaauguuaacugaaaguauaauuauucugauuaauuuuucugggcauagac

SEQ ID NO: 395750 - RNA, 89 nt, Homo sapiens
auuugaagacauagugcuguaauucuaaugaaagaugauaauuaacauaacccuuuaaugaaugaaugcagcacuuuuugauuuuaaau

SEQ ID NO: 395751 - RNA, 63 nt, Homo sapiens
gggcuucaugaaugccagcuugauaaacacguaccuguagcuaucacuggguucuugaagucu

SEQ ID NO: 395752 - RNA, 56 nt, Homo sapiens
guugguucuguuuaugugauggauuacguuuauugauuugcauagguugaaccagc

SEQ ID NO: 395753 - RNA, 65 nt, Homo sapiens
gcacauccagugauauagagguaugagaggccugauuuucauguauuaucauuagugggugaugc

SEQ ID NO: 395754 - RNA, 76 nt, Homo sapiens
gagaguucuguagauaucuaucaggucaauuugcucuagugcugauuucagauccugaauaucuuaguuaauuuuc

SEQ ID NO: 395755 - RNA, 58 nt, Homo sapiens
uagcaguagacagacuuuggcuacuguguguccauuuccaauuauugaucuacuguug

SEQ ID NO: 395756 - RNA, 62 nt, Homo sapiens
ggccccuggcagucugccucuucacuguagcuggcugcaaguguagagaagaguugcuggcc

SEQ ID NO: 395757 - RNA, 91 nt, Homo sapiens
cacaaauauuugcuccuguguuauaauugccuacaguauucaacagaguaacauacuguauaggauuguagccuaggagcaauaggcugug

SEQ ID NO: 395758 - RNA, 69 nt, Homo sapiens
cuggaagggcaggccucaggccugaccuucaggaauggcuccuggaggacugcagaacugaggccccag

SEQ ID NO: 395759 - RNA, 61 nt, Homo sapiens
guggguaaaucucuguucgaggcuuucagcuucgaaggcugugagaccccugauuucccac

SEQ ID NO: 395760 - RNA, 87 nt, Homo sapiens
ugaggauauuaauuuuguauugcuugaggaaaugguaauguccuccccugaggcaguugcccugcaagacaguacugaugcucuuca

SEQ ID NO: 395761 - RNA, 101 nt, Homo sapiens
ggggauauggcagugaacagcacaaaaguuguuucugcuuguggaggucacauuucagugagacgaaaacaacaaagugugugugugcaucccugcccccc

SEQ ID NO: 395762 - RNA, 73 nt, Homo sapiens
aucugucugguuggagaaucacugcaagccaaggcguggcauuggccaauggugauucccggccuccucaggu

SEQ ID NO: 395763 - RNA, 56 nt, Homo sapiens
uccccuuccucccaugaggcuuggggaacuucgaaguucucugguguuggagggga

SEQ ID NO: 395764 - RNA, 60 nt, Homo sapiens
uugaaguaugaccgcugagaauggccaagacuuagcuauuguuacaggugcauacuccaa

SEQ ID NO: 395765 - RNA, 79 nt, Homo sapiens
cuguuggcaauauuuacugaaguugaaaauaugcauguucucucaccaccaguucuacuuccaguuauauagccagcag

SEQ ID NO: 395766 - RNA, 99 nt, Homo sapiens
caggaacaggccauuuucacuucuuuugugauucuucaguuacuucaggccaucuggauguauacgugcaggucacaggggauaugauggcuuagcuug

SEQ ID NO: 395767 - RNA, 60 nt, Homo sapiens
augccucccaaaaguguucauauuuuaauucucagaacaugugaacauguuggguggcau

SEQ ID NO: 395768 - RNA, 83 nt, Homo sapiens
ucuuuacaaggggaguucaugcauuuguggauuuguaugaggauaaaguugaaucacauguguaugagcuuugauuauggaga

SEQ ID NO: 395769 - RNA, 89 nt, Homo sapiens
aucuuuacaaucagcagggugggcugaguuuagaggaugccagagacuggcaguguucaaaucaugcccaucuggguugauccuaggau

SEQ ID NO: 395770 - RNA, 57 nt, Homo sapiens
ggaauuccauaguacagugaugaguguuacauacuuauaagagugcuauggggaucu

SEQ ID NO: 395771 - RNA, 61 nt, Homo sapiens
guugacuaggagcuacuacuacauuagaaacgagagucucagaagccuuaucuuagucaau

SEQ ID NO: 395772 - RNA, 81 nt, Homo sapiens
uccccuuuacccaacacagauggauuuuguaggcugaucaugguaaggucaaaugcacagaaccauuaaggguugggggga

SEQ ID NO: 395773 - RNA, 62 nt, Homo sapiens
uugguuugccaguauuuuauugaggauuuuugcauugguguucaucagagauauuggucuaa

SEQ ID NO: 395774 - RNA, 75 nt, Homo sapiens
ugauuagaguuuucuguguugucauuauuguaucuccuguuaauacagugucugacacguaggaagcacuaauua

SEQ ID NO: 395775 - RNA, 93 nt, Homo sapiens
ucacacuaucacacccaggcuagagugcagguguaugguuacagcucacuguugauugcacaccugcacucaagccaugaugugacagaguga

SEQ ID NO: 395776 - RNA, 106 nt, Homo sapiens
cugaggcaggauaaucgcuugaacccgggaggcagagguugcagugagccgagguggcaccacugcacuccagccugcugggugacagagcgagacucugucucag

SEQ ID NO: 395777 - RNA, 76 nt, Homo sapiens
uauaauuugucagcuuucaaggugaugcaaguauuaaaucauauacuucuguaaacuaugagcugauuauuuuaua

SEQ ID NO: 395778 - RNA, 55 nt, Homo sapiens
gcuggagagcauauaucaccaggauaugauaucuaggagguguuggauuucuagu

SEQ ID NO: 395779 - RNA, 70 nt, Homo sapiens
uugagguucgcauuaugagcauuuauuaagaugguauaauacuuuaaguguaaguggugugggacaucaa

SEQ ID NO: 395780 - RNA, 80 nt, Homo sapiens
gagaaguagugguccaguuuuguuaacauaugguuauccagcugucugagcaccauuuguugagaagacuguccuuucuc

SEQ ID NO: 395781 - RNA, 75 nt, Homo sapiens
aggaauggagucuucaggggguguaucaucuaaaacaaggaaauaaaaugauucuucacuauggagcucuuucuu

SEQ ID NO: 395782 - RNA, 103 nt, Homo sapiens
uugagguggagucucacucugucacccaggcuggagugcaauggcguggucucggcucauugcaaucucugccucccagguucaagugauucuucggccucag

SEQ ID NO: 395783 - RNA, 89 nt, Homo sapiens
ggaguuucacucuuguugcccaggauggagugcaauggcgcaaucuuggcucagugcaaccuccaucucucggguucaagcaauucucc

SEQ ID NO: 395784 - RNA, 58 nt, Homo sapiens
cuccacuacagacucaucuacucaccugaggauuaugaggauuaugaguuuuauggag

SEQ ID NO: 395785 - RNA, 93 nt, Homo sapiens
ugucacuugccucauccaaucugcugacuuuagaacccaaaaaguuucuuugguaugggcuuuuggagcugaauuacaguggagggcaugaug

SEQ ID NO: 395786 - RNA, 87 nt, Homo sapiens
cccauaaaugcuggaaaauauucaucuauauguaucauucuuucucaaagauggcacuacugggaaugucuucaguacaauugaggg

SEQ ID NO: 395787 - RNA, 77 nt, Homo sapiens
ugcgcguccgugugaagagaccaccaaacaggcuuugugugagcaacauggcuguuuauuucaccugggcgcaggcg

SEQ ID NO: 395788 - RNA, 129 nt, Homo sapiens
uuauucccaguagccaaggauuucuggaaacuccuugucucccuucccauuaggaagcuagaaaguuucuccuccauauuuuccuuccuauugcugaaggggaauuguuuucagcuuugacagggacca

SEQ ID NO: 395789 - RNA, 96 nt, Homo sapiens
ugguagagggcagagggaugagggggaaaguucuauaguccugagaucuaauuacaggacuauagaacuuucccccucaucccucuacccuuacca

SEQ ID NO: 395790 - RNA, 101 nt, Homo sapiens
ugagauggagucucacucuguugccgaggcuggagugcaguggcgugaucuccacucauugcaacuucugccucccagguucaagugauucuccugccuca

SEQ ID NO: 395791 - RNA, 72 nt, Homo sapiens
cugggcgugguggugucugccuguaaucccagcuacucaggagguugaggcaggagaauuacuugaacccag

SEQ ID NO: 395792 - RNA, 103 nt, Homo sapiens
cccacagugcugggauuacaggcaugagccauggcaccuugucuaaaaagagguauuuuuggccuggcgcgguggcucacgccuguaaucccagcacuuuggg

SEQ ID NO: 395793 - RNA, 58 nt, Homo sapiens
agcuacguuggggaaguucucaugaaugacauccugaaacauguuuuccaacuugguu

SEQ ID NO: 395794 - RNA, 73 nt, Homo sapiens
cuucacauauaaauacaacauguguuaaaggacuaaauuucuagugucacaguuuguacuuuauaguuugaag

SEQ ID NO: 395795 - RNA, 75 nt, Homo sapiens
aucaugcacuuggcaggaugauucccaauuggggagauuucgccccucaggggacaccuggcaaugccuagagau

SEQ ID NO: 395796 - RNA, 90 nt, Homo sapiens
uauuggauuagaagcauuaggaugaaagaaucuuguuuucauaaauugguggagaacugacauuaucguguauguuacuauuguucaaua

SEQ ID NO: 395797 - RNA, 82 nt, Homo sapiens
gggucuaaugguauuucuaguucuagauccuugaggaaacacuacacugacuuccacaaugguugaacuaguuuacaguccc

SEQ ID NO: 395798 - RNA, 65 nt, Homo sapiens
uucuuuuaauugugggggagugugaguugcuuacguccuuacucaaaucccucagaauuauagaa

SEQ ID NO: 395799 - RNA, 100 nt, Homo sapiens
acaguagagugggcguacacccugugauauuauuuguaauauccuagaaagauauugcuccuaauaucacgguggcucuacacccugugaucuuaauugu

SEQ ID NO: 395800 - RNA, 64 nt, Homo sapiens
uggaaaaugcagcacucaagugggaacacagaaaugcauuuucucacuuugggcuguaguucca

SEQ ID NO: 395801 - RNA, 60 nt, Homo sapiens
auaguaucacauggucuuaauuacagcgguuuuauuauaauuuuggacaugugguauugu

SEQ ID NO: 395802 - RNA, 86 nt, Homo sapiens
uuagccucuuuacuugagaucauuaugucaggggucauuagaaacugaauugaaccauauauaauguucuugauuagggauguuag

SEQ ID NO: 395803 - RNA, 64 nt, Homo sapiens
uuuggacgcauuuuguaauggcaaaaacaucuucuaaaaauguaaguugcauaguguauccaaa

SEQ ID NO: 395804 - RNA, 74 nt, Homo sapiens
agcuccuggauucacugauuuuuugaaggguuuuuugugucucuauuuccuucaguucugcacugaucuuaguu

SEQ ID NO: 395805 - RNA, 77 nt, Homo sapiens
ucucauacuuuuauagcaacacucugcucuagcuaccaauuuucugugcuaagcuguauuguguugcuauaaagaga

SEQ ID NO: 395806 - RNA, 91 nt, Homo sapiens
uucucagagcugccagaaacaucaucugaggguuugggcaucagcucugccuggcugguguucaggcccucagucacuuuggaagugagaa

SEQ ID NO: 395807 - RNA, 92 nt, Homo sapiens
ucauuuuuuauuuaaauaugugauaguuuaagcaguagugccuaagauaaugcucuacucaguagacacucauaugugugauuauuggauga

SEQ ID NO: 395808 - RNA, 75 nt, Homo sapiens
ugagaagcauagaauaugacuuuuagauccaagaacuuaccuacuugucucuuguuaucauuucugaguugcuca

SEQ ID NO: 395809 - RNA, 86 nt, Homo sapiens
gccagguaccuguuuguucgucuuguacuauugcuuuaaaacuaaauuauucugcuuuuagaaaaugacauaggcugguaucuggc

SEQ ID NO: 395810 - RNA, 102 nt, Homo sapiens
agauucacagucucagaaguuggcaucugucauggaaaucuacauuguuagcucaacugucugauagaacuuucuaugauaauugaaauauucugugaaucu

SEQ ID NO: 395811 - RNA, 59 nt, Homo sapiens
ugccuaagcagaaguuugcugcaggggcagggcccucauggagaacaucugcuagggca

SEQ ID NO: 395812 - RNA, 84 nt, Homo sapiens
cuaaguguccaucaguggaggacuggauaaagaaaaugugguguauacauaucuuuauccaauccuuuagugauggacgcuuag

SEQ ID NO: 395813 - RNA, 72 nt, Homo sapiens
gcugagguggcacaggguuguuggucauaugauuugcuaucugauggccugaugcaccugucccaccacagc

SEQ ID NO: 395814 - RNA, 74 nt, Homo sapiens
uggaaaguaguucuaaucuaaggacuuuauuuccccuacauuugucccuuuggaaauuuggaauaacuuugcca

SEQ ID NO: 395815 - RNA, 61 nt, Homo sapiens
ggugaauguguuauuuuuaaccuccauuaggaaaggagguuaguaguaguuugcauuuacc

SEQ ID NO: 395816 - RNA, 68 nt, Homo sapiens
ggcuauugucaguguucacucaaagcucaagggcucuucagugaccuuguggugaaugcuggcaggcc

SEQ ID NO: 395817 - RNA, 73 nt, Homo sapiens
uuucuucaggccacaaaaauggucaaggcaauaacaagaccgcuguguacaacuauuaauguggcugaagaga

SEQ ID NO: 395818 - RNA, 56 nt, Homo sapiens
gcuguuugagagaacuucuccagauggcuucuagcugguuuauuucucacaacagc

SEQ ID NO: 395819 - RNA, 70 nt, Homo sapiens
acucagggugaugguugaaugaauuaugggacauuugucucauggaauacuucacagccacuaaaagagu

SEQ ID NO: 395820 - RNA, 78 nt, Homo sapiens
uuguaaguauagcuaugauaaacauucucauuguugccucucucuacauguaagaguuuuucuuggcuauauaugcaa

SEQ ID NO: 395821 - RNA, 84 nt, Homo sapiens
guuaguguacaaaaugauagauaaauauuugcuguugcuaaaagcaucuuagugauaaccuuuguacuaugguuuuucacuaac

SEQ ID NO: 395822 - RNA, 108 nt, Homo sapiens
gguggaacuuaacucucaugaauguauuuggaaguccucauaccugauucuggccuuaccuuagagucacaugaggcccuucauuaaaacaacauggauccuuccacc

SEQ ID NO: 395823 - RNA, 75 nt, Homo sapiens
ucuguaggaaugaugggaugucagcagaugucuagacagaaaugugcagaaucccuucagauccgaggugacgga

SEQ ID NO: 395824 - RNA, 68 nt, Homo sapiens
uuuguguuuuauuuucugcuguauucauacaauuuacaacagugccuggcaagagaauacaacauaaa

SEQ ID NO: 395825 - RNA, 91 nt, Homo sapiens
uggagagaaggagguuccucugacuagaggaucuuagggggcugaggugcaggcuguuaagguuuuuguagcaaggaugucuucagcuuua

SEQ ID NO: 395826 - RNA, 56 nt, Homo sapiens
uggcuagaugagauguacugcacguggcuucugcugcaggcaccuacaucuggcca

SEQ ID NO: 395827 - RNA, 84 nt, Homo sapiens
gggcuauagacacuaagaggccaaggccagaggggucagcucacaagcucacaagcuccugccuuugcuucguggugcaggcuc

SEQ ID NO: 395828 - RNA, 105 nt, Homo sapiens
gugcauuaugugggaguauguauuugcuacuuggauguacauguguaccucaagcuguguugugugggcauauguguaucggugcaaaugcacuuauagauguau

SEQ ID NO: 395829 - RNA, 60 nt, Homo sapiens
uggagcuucuguuuuucugccuugcaggguuccugaaggcagguagaauagagacugcca

SEQ ID NO: 395830 - RNA, 70 nt, Homo sapiens
ccuaaacaaauagagggauauaagcauauuuauacauugaguauguaggaugugucuuagucaauuuggg

SEQ ID NO: 395831 - RNA, 67 nt, Homo sapiens
caugauccuucaaaugaagugggauaaggagauccgcccaacaucccaguuuuucugaauagucaug

SEQ ID NO: 395832 - RNA, 89 nt, Homo sapiens
gccuuugguuuggaauccuuguagccacaaguggugaggaaguuuaaaagcgcuuugguggcuugauggcacaagguuucugaaugggc

SEQ ID NO: 395833 - RNA, 104 nt, Homo sapiens
ccaggaaguggagguagcagugagccgagauggugccauugcaccaccacccagguuggagugcgguagugcaaucauggcucucugcagccucaaauuccugg

SEQ ID NO: 395834 - RNA, 108 nt, Homo sapiens
cuauguccuagucuauuucaguuuucucucaaguagugguuuucauugaacuaccaaaaaguugcaagggcaaccacacuugaagaaaaacguguuaguaacauauag

SEQ ID NO: 395835 - RNA, 76 nt, Homo sapiens
ugucuuuaucagcagcaugaaaacaggcuaauacaguaacuugguaacaguagaguggggugcugcugaaaagaua

SEQ ID NO: 395836 - RNA, 57 nt, Homo sapiens
ucugugugacacacaaaguaugcaucacacauaccuacauuuuugugugugacgaga

SEQ ID NO: 395837 - RNA, 129 nt, Homo sapiens
agauagcccgucagagaggccaaacacagacagguuucgcuuggccuccuggucauauccagcaugcuuugauacacuggaggagcaggaggccgaggaggcggcggccgcuaucugagggagcugucu

SEQ ID NO: 395838 - RNA, 67 nt, Homo sapiens
cugauuguuugccucuaaaaucagaguuucauuuguaguaacuccaauuuagauguaagauaauuag

SEQ ID NO: 395839 - RNA, 56 nt, Homo sapiens
cccagggggcagagguugcagugagcugagaucgcgccauugcacuccacccuggg

SEQ ID NO: 395840 - RNA, 57 nt, Homo sapiens
caggagcucuagcuauuuccaugauuacauuucaaaugaaugguuucgggguucuug

SEQ ID NO: 395841 - RNA, 59 nt, Homo sapiens
agcugguuuauuucuauauccuugccaaaacuggcagugcauauaggcugaaccaugcu

SEQ ID NO: 395842 - RNA, 71 nt, Homo sapiens
uguagagguuaacaucuacacuugaucuuagccaaaaggcugagaagugauauagaaguuaacaucuaaca

SEQ ID NO: 395843 - RNA, 72 nt, Homo sapiens
uuuuuuuugagauggagucucgcucugucuuucagucuggagggcaguggugcgaucuccgcucacuggaag

SEQ ID NO: 395844 - RNA, 66 nt, Homo sapiens
ggaaggugguggaaugucuauguuuuugauuuuacugugaguuaaaaaggcacauuucuaccuucu

SEQ ID NO: 395845 - RNA, 72 nt, Homo sapiens
aacaggugguauuugguuuucuguuucugcguuaauucucuuaagauaauggccuccaacuauaucccuguu

SEQ ID NO: 395846 - RNA, 75 nt, Homo sapiens
ucugugcuaggaugucuuuaaagcuucucggaacuaacuacuuuccuuuaguuaauaaagacaagcucacauagg

SEQ ID NO: 395847 - RNA, 88 nt, Homo sapiens
cagggaaauacuaacaacacugugauuggcuucuauaaaucuuuuguaaaucuuucacaguugauggucuagauaauuuuuuuuccug

SEQ ID NO: 395848 - RNA, 72 nt, Homo sapiens
gucccuugggcauugcuauaaauucuuuuccuccacagcgggaguggguuuguaagauguccgggcagggau

SEQ ID NO: 395849 - RNA, 63 nt, Homo sapiens
gcagugagcagugaguguggugcaggguuaggagcaggcccucagcauccucaugcucagugc

SEQ ID NO: 395850 - RNA, 58 nt, Homo sapiens
uggagauccuucauuuugguguuauaaugaaacugauucuagaaugacaugauuucua

SEQ ID NO: 395851 - RNA, 56 nt, Homo sapiens
uuauagcagcauaaauggacuaagacagagucuuaaaucaguuugggcugcuauaa

SEQ ID NO: 395852 - RNA, 129 nt, Homo sapiens
ucuuccucuuucucuuccucccccuccucuucuuccuucuucuuagugguauagacuugaaauuguuuaaagcaugacgagaagaagcuuuuggagagagaggcugaagaaucggggagcagaggaagg

SEQ ID NO: 395853 - RNA, 64 nt, Homo sapiens
auugugaauagugcugcaauaaacauacaugugcaugugucuuuauagcagcaugauuuguaau

SEQ ID NO: 395854 - RNA, 77 nt, Homo sapiens
gaucaaacaaguucucuaggaaguauaaagguuuuuacucuaauucuuuuggcuuaaagagaauguauauuuagauc

SEQ ID NO: 395855 - RNA, 78 nt, Homo sapiens
uucaguuuccguguaguugagcaguuuugagugagaugcuuaauccugaguucuaguuugauugcacuguggucugag

SEQ ID NO: 395856 - RNA, 97 nt, Homo sapiens
ucauucaagagauuuauugaacaugccauauguaccagcuauugugcuaggugcuggugauauaacauguauaauaaagaaacaaauuuugugauga

SEQ ID NO: 395857 - RNA, 67 nt, Homo sapiens
gauguauuaucuuugugguaucguguugaauucauuuagcugguauuuugucaaggauauuuacauc

SEQ ID NO: 395858 - RNA, 77 nt, Homo sapiens
uaaaacugagcuugcuuuguguaagcuacuauaguauuucauacauaucagaguuacacugaagacuaguuguuuua

SEQ ID NO: 395859 - RNA, 74 nt, Homo sapiens
ggcugguauuucuaguucuagaucccugaggaaucgccacacugacuuccacaggguugaacuaguuuacaguc

SEQ ID NO: 395860 - RNA, 58 nt, Homo sapiens
gaaagaaguugacccuccucccgugccgagagcuugggaugaaaauagcuucuuccuc

SEQ ID NO: 395861 - RNA, 66 nt, Homo sapiens
uagcuguuaauauacaaaugguggaaaguauuauugccuaucacaguuuugaauauaaugcagcua

SEQ ID NO: 395862 - RNA, 83 nt, Homo sapiens
auuuuuaguagagauggggcacaugccaccacaccuggcuaaugccaccaccccuggcuaauguuuguauuuuuaguagagau

SEQ ID NO: 395863 - RNA, 129 nt, Homo sapiens
gcugcuaagaugagucucuagaucacuugucaucauuauguuguguggcugauaaagacuuuaucuuuaaugcaucccaaaauguaguugcugacuucccuguauuucuuuauucacucauuuuuucau

SEQ ID NO: 395864 - RNA, 68 nt, Homo sapiens
ggucauggccuuuuuaucucaccaaguguggugccugcuccuucacaugcuuggagaaggcuaugacc

SEQ ID NO: 395865 - RNA, 105 nt, Homo sapiens
gucauaguuguaaccaaacugaauaacaugcuuuguuuaugacuuucuuugagcauuuguagcagagcauauucauucggggagggaauauuuuacaauaaggac

SEQ ID NO: 395866 - RNA, 101 nt, Homo sapiens
uugaucauuuagucagugagaaugcaugaaagacuuacauauuuuggugacuuauuucauuucuauuuguaagucuuugugcuucuaucuauaauaaucag

SEQ ID NO: 395867 - RNA, 58 nt, Homo sapiens
acccaggaggcagagguugcagugagcagagauugugccacugcacuccuccuugggu

SEQ ID NO: 395868 - RNA, 77 nt, Homo sapiens
cagagugggagcucuagaaagauuguugaccaaucaucuuauugacuagaccaucuuucuagaguauaacuauuuug

SEQ ID NO: 395869 - RNA, 58 nt, Homo sapiens
ggccaccuagaggguggaugcgcuggccaggugcagcagcucaugccuuugggaggcu

SEQ ID NO: 395870 - RNA, 66 nt, Homo sapiens
uuuuuuaaauuaaugggagugacaggguggaacauuccacccugucacucccaucaauuugaagaa

SEQ ID NO: 395871 - RNA, 78 nt, Homo sapiens
uagaaagacugagcaucauucacaccuugguccaggcccaugugcauuaccuguccugugaugcaaucuguuuuucua

SEQ ID NO: 395872 - RNA, 100 nt, Homo sapiens
gucaugaggguuugugaagauuaaaugagauaacacugaguaagcacuuaaaauguaauguuucaucauuauuaauauagucuuuauuuucucugaugau

SEQ ID NO: 395873 - RNA, 103 nt, Homo sapiens
uuaauuauacuuuaaguuuuaggguacaugugcacaaugugcagguuagcugcauauguauacaugugccauguaaauuucucaucaauuuuaguaucauuag

SEQ ID NO: 395874 - RNA, 58 nt, Homo sapiens
ccacaaucuaaagggcuguaucucauacccuuaagaguaugcaaacccugcuuugugg

SEQ ID NO: 395875 - RNA, 62 nt, Homo sapiens
ggugauuagagcccaagcuuugaauucacacagaccugaauucuaauccuggcucugucacc

SEQ ID NO: 395876 - RNA, 79 nt, Homo sapiens
cuguuugguuaucuuuuccuguccauuguuauagucagauacaagaggguaaugaaaaauagaagagaaaagugaacag

SEQ ID NO: 395877 - RNA, 90 nt, Homo sapiens
ggaagguagugcuugcacuagugcagaggcgcuggcaagccaucucuguaggcuucagggugccucaccauuggcagggaacgcccuucc

SEQ ID NO: 395878 - RNA, 68 nt, Homo sapiens
uccuaguuauugaaugucuauuaaguuguuuugacauucaaguuuauuuagcagauauuuauugagga

SEQ ID NO: 395879 - RNA, 66 nt, Homo sapiens
gggagccauggcagaaucaagccgacagccuuagucaggcugcagccuucuugccauuaaacucuc

SEQ ID NO: 395880 - RNA, 62 nt, Homo sapiens
cauauuggaugugggauaguguacaucaaugaaaaugaacuaauguugcacauaucaauaug

SEQ ID NO: 395881 - RNA, 88 nt, Homo sapiens
ggagucucgcuguauugccuaggcuggagugcaguggcucaaucucggcucacugcaaucucugccucccagguucaagcgauucucc

SEQ ID NO: 395882 - RNA, 76 nt, Homo sapiens
agguugaaccauaugaaauggccaucuuuguagguuaaaagugguugacucuuggcaguuucauaugguucaaccu

SEQ ID NO: 395883 - RNA, 128 nt, Homo sapiens
gugacacucugucucaaaaaaaaaaaaggaauagaguggaauauaaagcaucguguaauacagggccguguaauacagggugguauuuuuaaaacuaaaauuuucuuuuuuuugagacggagucucgc

SEQ ID NO: 395884 - RNA, 56 nt, Homo sapiens
uucaagucaacaagcacuugagaguucucauguuuuuuaagagcuugaaauuugga

SEQ ID NO: 395885 - RNA, 67 nt, Homo sapiens
uggaguucuaacuaguaaagggcagagccauguuuuaaaucauggucuggucccugguuggaaacca

SEQ ID NO: 395886 - RNA, 64 nt, Homo sapiens
uuguuuauccauuaaccagcgacuggucauuuguuugcuuccaguuuuuggcaaugaugaauaa

SEQ ID NO: 395887 - RNA, 90 nt, Homo sapiens
ugucuacagugcugaguaucuugaugaauuugaaauguucaguuaauuaaaacauuucaaaacagcuagauauuggaugucacugagaua

SEQ ID NO: 395888 - RNA, 67 nt, Homo sapiens
uaaauauuagguuggugcaaaaguaauugcaaaaacuguaauuacuuuugcaccaaccuaauggaua

SEQ ID NO: 395889 - RNA, 80 nt, Homo sapiens
gccgggcucugcagggaggaaggagaggugcugccggaggaggucgugagcuccucuucugcugcaggagugguccaggc

SEQ ID NO: 395890 - RNA, 100 nt, Homo sapiens
ucccuaaaaacagaaugugucaacuauguuaauaaguuucauuauuuaugguaacaaugacccugauuggcaaguugcaccucggacuguggacuagggg

SEQ ID NO: 395891 - RNA, 77 nt, Homo sapiens
ucagcugaacuaguacacacuuacauaacugugaguuaugugaguagcugugaguguguacuaguuaucacaguuga

SEQ ID NO: 395892 - RNA, 69 nt, Homo sapiens
ucacuugaacucgagaggcagagguugcagugagccgacauagcaccacugcacucucagcuuggguga

SEQ ID NO: 395893 - RNA, 71 nt, Homo sapiens
gaagucagguacaauaaccuuagaauaacaucagaguuacuugaguucuuuuagggauauugcuugauuuu

SEQ ID NO: 395894 - RNA, 68 nt, Homo sapiens
ccuucccacccgcccagguguggccgggacagcaccgcaguuguggcgccccugggugggcaggaggg

SEQ ID NO: 395895 - RNA, 62 nt, Homo sapiens
ucagucuacagcacugagcugugugcagggcuccuaugcacccugucagucuguagcacuga

SEQ ID NO: 395896 - RNA, 70 nt, Homo sapiens
aaugaucaaaugcaugaauaagcucgugugugaccacucuguucauaugggccugauuauggauauuauu

SEQ ID NO: 395897 - RNA, 60 nt, Homo sapiens
ggcuuagagcaaaccagucacaaauuaaagagaaacaaaugugaccucugucucugaguc

SEQ ID NO: 395898 - RNA, 89 nt, Homo sapiens
ggagaauugcuugagcccaggaggugaagguugcagugagcugagauugugccauuguacuccagccugggcaagaagagcaaaacucc

SEQ ID NO: 395899 - RNA, 67 nt, Homo sapiens
aaguccccuggggacaaaguccucaucuuggugugucuuugagauggauuuuguagccccagcacuu

SEQ ID NO: 395900 - RNA, 61 nt, Homo sapiens
ugugcaaucagcuucauuacauuuuucagcaccuuuaggaacuguagugggaguugacaca

SEQ ID NO: 395901 - RNA, 65 nt, Homo sapiens
gugucugacucauaguuaaguguucaauaaauauuuauugaguaaaaaauagugaugucauucau

SEQ ID NO: 395902 - RNA, 93 nt, Homo sapiens
uuuccauuagugaggcuacaguuauguuuuaaaugugcgauuacagagauggcaucugaacauaaacugauggcucgaaaaugaaaauggaaa

SEQ ID NO: 395903 - RNA, 76 nt, Homo sapiens
gguccuggucaauuguaccaucauuauacguagaaauuauguucugaauucuacuugaguguuggugacugggauc

SEQ ID NO: 395904 - RNA, 55 nt, Homo sapiens
ggcaaggauuagauucuccccuauagccccuggggagggagagugcagccuuguc

SEQ ID NO: 395905 - RNA, 90 nt, Homo sapiens
cuguggguagauacccaguggugagauugcuggaucaaaugguaguucuacuuuuaguucauuaaggaaucuccccacuuuuuuccauag

SEQ ID NO: 395906 - RNA, 86 nt, Homo sapiens
guguggauugcguguguugcagggcagggguugugaauugcucuucaaucacagcuacuccucugucuugugcaagccauuggcau

SEQ ID NO: 395907 - RNA, 73 nt, Homo sapiens
cugauucaauagcaagaugauugauccauuucuuucgugagaaauggaucaauuucuuuugugagaaauccag

SEQ ID NO: 395908 - RNA, 55 nt, Homo sapiens
guuuuuucagguuucacucgcaguuuauuugcuggagugcaaauaaagagagggc

SEQ ID NO: 395909 - RNA, 97 nt, Homo sapiens
gagugauaucuauaccuuggcuugugguuuuauaaacgugaccucauauucagagucuuugucuuuaaaauccaaaagaucaguuagauuuuuauuc

SEQ ID NO: 395910 - RNA, 85 nt, Homo sapiens
uuuccuguguguuuucaucugauucuuucagaaacccucucuguuaggaauggcagaugaaauugucauuuuacauaugaggaaa

SEQ ID NO: 395911 - RNA, 109 nt, Homo sapiens
uagagguaacaagcaguauuuuguaagugaagagugcuuuacaguucauagacuuccacugaguucucaugguguccugucucugcgcuuggcucuuguugucccucug

SEQ ID NO: 395912 - RNA, 64 nt, Homo sapiens
acugauggcagaugauaguaauguuauaaaaauuaaacaccauuaguaguagcugcaugucagu

SEQ ID NO: 395913 - RNA, 63 nt, Homo sapiens
gugagagaaugacuauguguuuugcaagugauuaaauucacaaacacaagucacuuuacuuac

SEQ ID NO: 395914 - RNA, 102 nt, Homo sapiens
ggcccucuugaucugaggcggggagacacagggauggguaggaccauggggguugaaccuuccuugcacuccacuguucuccuggcuuccaaagaacuggcu

SEQ ID NO: 395915 - RNA, 58 nt, Homo sapiens
ugagacggagucuugcucugucacccaggcuggagugugguggcaagaucuccgcuca

SEQ ID NO: 395916 - RNA, 69 nt, Homo sapiens
gagccaggugaagauuuacaauagguaguuggacacuaagacauggccuuugagaucuguaucugguuu

SEQ ID NO: 395917 - RNA, 123 nt, Homo sapiens
cauaccgugcaauauuaugcauaauaaauuuccaaauggauuucagcugaguauucaguauguuacugaauacuggcacugaagaccaugaaaugcacauaauagaacuguacuuuuggugug

SEQ ID NO: 395918 - RNA, 111 nt, Homo sapiens
guuuagacuaucauuucuugcauaucaacccaagcauacugugagaguuuuaaacaagaaucuuaauaaagcuauuauaguuauguuuuaaagaaguggauuuguuuaaau

SEQ ID NO: 395919 - RNA, 77 nt, Homo sapiens
gacuuugugaaguuguuagaguacaugagcauuacuuggguauguagcaauucaguacuuuggagcucacauaaguc

SEQ ID NO: 395920 - RNA, 90 nt, Homo sapiens
cauuuccugauugguucuauauagcaggcaucuacaauuuucagauuuccaugaaaacugccuuccuuguaggugcagccaguggaagug

SEQ ID NO: 395921 - RNA, 59 nt, Homo sapiens
agcuucuauuaaguuguagcuacaaauacacuguguacagugacaacuugguaggaguu

SEQ ID NO: 395922 - RNA, 75 nt, Homo sapiens
acacaggacacaaaagucaccauuuaaacuauuuuaaaguguccaauuugguggcuuuucguagguucacagugu

SEQ ID NO: 395923 - RNA, 67 nt, Homo sapiens
gagucuugcagcauguaggcacguuauucaguaauaauuagugagugcuuaacauguggcuaggcuc

SEQ ID NO: 395924 - RNA, 110 nt, Homo sapiens
aguucaucguaaauuuuuauuaaguucuugccaguuuuuacauuuccugucuucuguuuuucucuucagguacauggaacagaggcuguuaggaaauuugccuugcaacu

SEQ ID NO: 395925 - RNA, 90 nt, Homo sapiens
cacuuuugcaaaagaugcagaaauguuuuucaugugggcaacccaccuggaguugauucacgaagagccauuuaacauucugcagaggug

SEQ ID NO: 395926 - RNA, 59 nt, Homo sapiens
ccuugccauuugguacaguugguauaaauuaaccuagccacugggcuaccgaaguaagg

SEQ ID NO: 395927 - RNA, 71 nt, Homo sapiens
uauguaagugcaugacaaugauugcucuucauuuaaaagaugaaagaauauuuuuaugcaaauauuacaug

SEQ ID NO: 395928 - RNA, 56 nt, Homo sapiens
cagauggucuuaaggcagccuucugggugcacacaaggcaucuuauagaccacuug

SEQ ID NO: 395929 - RNA, 55 nt, Homo sapiens
cugggucaguuucugauuauugauuuaagacucauuugaauggaaauuggccuag

SEQ ID NO: 395930 - RNA, 77 nt, Homo sapiens
uucuuugucagauauguaguauggaaacauugucucacagacaguggcuuguauuuuuauauuugcuugacagggga

SEQ ID NO: 395931 - RNA, 87 nt, Homo sapiens
uuacauggaugaguugaauaguggugaaaguuugagauuuuagugcaccgucucaguuguuaccacuuuuaugaaaauccuauguga

SEQ ID NO: 395932 - RNA, 69 nt, Homo sapiens
uauguguuacaaauauuuugucccauucuguggcuugucuuuucaugguacaguauguuuggaugcaua

SEQ ID NO: 395933 - RNA, 65 nt, Homo sapiens
gugaaguagcaggauuguuacaauaguaaucagauuacuuaaauuuuaauccuuggugcuaucac

SEQ ID NO: 395934 - RNA, 58 nt, Homo sapiens
ugggacuaggucaccaagaugacagauugguaacaaggucuuaggugaccaguuccca

SEQ ID NO: 395935 - RNA, 105 nt, Homo sapiens
ucugaggcacaagaaucauuugaacacaggagcuggagguugcagugagccagguucaugccacugcacuccagccuugauggcagaucaagacucugucucaga

SEQ ID NO: 395936 - RNA, 85 nt, Homo sapiens
gcauaaucaaagauuagaguagggguggccagauuuuugcacgguaugcaaauggcacacaccuggucuaaccaaucuuucaugc

SEQ ID NO: 395937 - RNA, 68 nt, Homo sapiens
uucuggcugauuagccauaaauugggguuaccacagcucccucuuuugguucaauuaauuugcuagag

SEQ ID NO: 395938 - RNA, 77 nt, Homo sapiens
ggguauuacauugcacuuuauuagauacaaauaaaacuuuuaugaaaguguuuauaggagugaaugcuggaagaccc

SEQ ID NO: 395939 - RNA, 59 nt, Homo sapiens
uagguuguucucaugauuagaccaauauaauguaucuaaugcucugagaacagugccug

SEQ ID NO: 395940 - RNA, 74 nt, Homo sapiens
ggcuauugugaauagagcugcaguggacauugguguacaaggaauugagucgcugcuuucuauucuuuuggguc

SEQ ID NO: 395941 - RNA, 109 nt, Homo sapiens
uugaaaugugaaagggacaugagauuugggaggggccagugcagaaucauaugguugccuuuguguccccacccaaaucucaucuugaauuguaauccacacaugucaa

SEQ ID NO: 395942 - RNA, 64 nt, Homo sapiens
guugaguuacauuguaauugccgagacgcaggauggcaucucugcaauuagaauguaauauaau

SEQ ID NO: 395943 - RNA, 79 nt, Homo sapiens
ugaucagucaccacaaaugugguugcaaauauauuagguuccaaugauagaaaugcaaagaaauuuuggugaccaguua

SEQ ID NO: 395944 - RNA, 62 nt, Homo sapiens
gcaugcuguguaggcugcgauuucucaaguccaaacuggaucacaguuccucacgggcaugc

SEQ ID NO: 395945 - RNA, 94 nt, Homo sapiens
gccaaucaacgcccuguagcuagcuagagguuuguaaaaugcaccaaucagcgcucuguggcuagcuacagguuuguaaaaugcgccaauuggu

SEQ ID NO: 395946 - RNA, 67 nt, Homo sapiens
ucucuuuugcacaguaggugguaggacuuugucaugacaaggacuacagacccacuguagaaacaga

SEQ ID NO: 395947 - RNA, 68 nt, Homo sapiens
gagauggagucuugcuauguugccaaggcuggucucaaacuccuggccucaaguaauacuccugucuu

SEQ ID NO: 395948 - RNA, 113 nt, Homo sapiens
uugcaauucuacuguacccuucauuauucaccuacuuuugccauguguguaaggguauaauuuugcauguacguacagagagagugaguguuaaagggauagagggacaguga

SEQ ID NO: 395949 - RNA, 63 nt, Homo sapiens
cugucuuugggacuggaaggaguaaggguuuccuuccuuauagcacuagauuuuaaacgacag

SEQ ID NO: 395950 - RNA, 80 nt, Homo sapiens
uuuugaaaacaaauuugucuuauugggauuaucuuugguagaaauagagaugccuaugaagagaaauuauguugaaaaaa

SEQ ID NO: 395951 - RNA, 85 nt, Homo sapiens
ugcaacaucucuucuccacgugaaugccaaguauuuggaaaguaccuaagugcucagcccaugggauccaaaagacacaugugca

SEQ ID NO: 395952 - RNA, 128 nt, Homo sapiens
agcaaggguaacuguaaugucuguauuaagggaagauugugauggucaaaggaaauagggcguauguaacugcuuuauuuucuacaagcaucauaaacugaucuauacacauuuauguaguucuuguu

SEQ ID NO: 395953 - RNA, 65 nt, Homo sapiens
auggcauuuggguggggacacagccaaaccauaucauucugccucuggccccucccaaaucucau

SEQ ID NO: 395954 - RNA, 63 nt, Homo sapiens
cuacauuuuaugcuugugugaauuuucccaguacuugggaaacacacuggcacaaguaggugg

SEQ ID NO: 395955 - RNA, 72 nt, Homo sapiens
uauuuuccuuuuauacucgucugaaugauucuuugaaagagaauguuuucaugagaaugaauaggggaaaua

SEQ ID NO: 395956 - RNA, 73 nt, Homo sapiens
gcuggugucuguuaugacacucuuuuuaucaucaaugcuuuuuaugauacaccugaguguuauaaucauuagu

SEQ ID NO: 395957 - RNA, 58 nt, Homo sapiens
ggugcuggggauuucaugauaaacaagauacucccugcugucaaggaauucccaaauc

SEQ ID NO: 395958 - RNA, 56 nt, Homo sapiens
uaugccuuuuggcucaagaaacauugccauauauguugcuugaaccaaaaggcaua

SEQ ID NO: 395959 - RNA, 58 nt, Homo sapiens
gaaucuguacuuggaggccccauacaaccauucugcauuucacuuucaguacagauuc

SEQ ID NO: 395960 - RNA, 72 nt, Homo sapiens
ugucauguugagaaacuuggauuucacccuggaggcgcaggaacuaggggggauuuuucagcagcagugaca

SEQ ID NO: 395961 - RNA, 74 nt, Homo sapiens
gggguugccccuggcauugaguggguaggagucagggaugcugcuuaacauucuacagugcacaggacagcccc

SEQ ID NO: 395962 - RNA, 60 nt, Homo sapiens
ggagccagaaaugcugugguuggggcauuucaucaaccaaaucacaguuguucugccuuc

SEQ ID NO: 395963 - RNA, 130 nt, Homo sapiens
cagcugcuaauggguggagacccccucacucccaccccacuuccugccugcugaugcugccugagagcuuccuggcaguuucucaggcagggguauggggaaggaggggggcccuacucaccuuuagcug

SEQ ID NO: 395964 - RNA, 76 nt, Homo sapiens
uugucugcaugucauaugauaguaacaagacaucccacauguaugaucaguugcaauuauguaacaauguagacaa

SEQ ID NO: 395965 - RNA, 90 nt, Homo sapiens
uuucagguaucuucauagcaaugcucuacuucccaguaccaauuuucuguauuagucuguucuugcacugcuaugaagaacuaccugaga

SEQ ID NO: 395966 - RNA, 63 nt, Homo sapiens
cuguccugcaaauguguuuuaaaccaaagaaaucaucuuuggcaugggcuauuugcuuuauag

SEQ ID NO: 395967 - RNA, 102 nt, Homo sapiens
ugagaggggaggagugcuugagccuaggauguugagauugcugugagcuaugaucaugccacuguacuccagccugggcaacagagcgagacccccaucuca

SEQ ID NO: 395968 - RNA, 65 nt, Homo sapiens
guuggcauagucuuuuauaauuuuccucauccaauggugaugauuagagaaauacugcugcuaau

SEQ ID NO: 395969 - RNA, 67 nt, Homo sapiens
aguugaucucauuggcuacugaggcuuguggauucaucacguaguucucaugccaugguuuucagcu

SEQ ID NO: 395970 - RNA, 58 nt, Homo sapiens
auuguuuuccaaagaugcugcuuccucugcaguuuugcagguuguuuuuggauacaau

SEQ ID NO: 395971 - RNA, 59 nt, Homo sapiens
uguccaggcagagguuugcugcaggagugaacuccucauggagaaccucugcuagggca

SEQ ID NO: 395972 - RNA, 70 nt, Homo sapiens
gguauuucuaguucuagauccuugaggaaucaccacacugucuuccacaaugguugaacuaguuuauacu

SEQ ID NO: 395973 - RNA, 82 nt, Homo sapiens
gagacauaaaacuggcuagggucaaacgucaucuugaagguuuuuaaggaaagcauuuaauucagcggcagauuuaugucuu

SEQ ID NO: 395974 - RNA, 60 nt, Homo sapiens
accuaaaaggcuaguuuccaacuagcuccugaaggcuaacuggaaauuaaccuuucaggu

SEQ ID NO: 395975 - RNA, 57 nt, Homo sapiens
ugucaugugagggaacuuguuccauuguuaauuuaugcugcgaauuccuccauggca

SEQ ID NO: 395976 - RNA, 77 nt, Homo sapiens
agaggauguuccaaaaaugauucuucuggcagacucucugucuuugagauaggguuauuuuuguacuuaacaccucu

SEQ ID NO: 395977 - RNA, 73 nt, Homo sapiens
ucuuaaaaauggcucuggauagaaugcaggguauguuaucaucauugugauuacuuccagugcuguaaugagg

SEQ ID NO: 395978 - RNA, 101 nt, Homo sapiens
cugaacacacuaaaaccuauuuaauuuuauacucugcauugaugaauuguauggugugugaauuaaauguuaauaaggcagguguguguguguguguucag

SEQ ID NO: 395979 - RNA, 130 nt, Homo sapiens
acuccugaccucaggugauccacccgccucagccuccuaaagugcugggauuggccgggcaugguggcucaugccuguaaucucagcacuuugggaggccgaggugggcagaucaccugaggucgguagu

SEQ ID NO: 395980 - RNA, 98 nt, Homo sapiens
gggaauaaacauggagcucaucuagcauagagguuggcaaacuuucugucaagaaucagauaguacauauuuuuggcuuugugggcucuaugguuccc

SEQ ID NO: 395981 - RNA, 65 nt, Homo sapiens
gguauugccacuuuugaacaguugguggcuccaaugcuuugcaacugucuugcaagugugauacc

SEQ ID NO: 395982 - RNA, 118 nt, Homo sapiens
uuaccauaauguagaaucagugggaucccugagcuuguuuuccugcaacuagauggucccaucugggggugaugggagacaaugacagaugaucaggcacuagauucucauaagguag

SEQ ID NO: 395983 - RNA, 102 nt, Homo sapiens
cccagaggauucuaaugugcacccaggguugagacccacugacuugaucaaugcuccugguuaaugcuuuuuacacuuuggugugcuggaggaucaccuggg

SEQ ID NO: 395984 - RNA, 60 nt, Homo sapiens
uucccuucaaguuuuagauucuagggaaguuaaaaugaguaucaaagacuuagaggggga

SEQ ID NO: 395985 - RNA, 87 nt, Homo sapiens
ucaggauaaggucucuugcaaaugcaguacaauccaaaaaaguugucauuguacuuauugccagaauuuaccuuugcuuuguccuga

SEQ ID NO: 395986 - RNA, 84 nt, Homo sapiens
gcuuacguggucuguccaaaguuaaagaguuaguaacuuguggaaccaguauucaucuuaagcuuuggcuuaaagaccacaagc

SEQ ID NO: 395987 - RNA, 76 nt, Homo sapiens
ugacuucauguuuugguugucccuggccaguccagcugguagaugucuggauacauggcaaaaccagagcacagca

SEQ ID NO: 395988 - RNA, 67 nt, Homo sapiens
ggcuuauuaagucacacuagacaacugagguugccuaagacgucauugucuuggacuugcaagggcc

SEQ ID NO: 395989 - RNA, 58 nt, Homo sapiens
aggugcuugagggaagaaauuaugcaucuuauucaucuucauuuucccuucagcaccu

SEQ ID NO: 395990 - RNA, 56 nt, Homo sapiens
uuggccagugucuuuuuuuccugucauauauuuaggaagauugagauaaugacuaa

SEQ ID NO: 395991 - RNA, 68 nt, Homo sapiens
gcaggcuucaucaaauuuagguauuuagacacugugucuacuucagacuggauugugaugggauuugc

SEQ ID NO: 395992 - RNA, 73 nt, Homo sapiens
uggacacaauaguugcuaccuugugaaagauucauguaauugaccaguguuuaccaaguagcaucuguguuca

SEQ ID NO: 395993 - RNA, 81 nt, Homo sapiens
ggugucucuguggcccuaggguagggcucuacugcagcccuaggguagagagcuaggccacuggggcuuccagauugcacc

SEQ ID NO: 395994 - RNA, 68 nt, Homo sapiens
ugugacauuuuuacugaugagaguucuaguaacaguuaacucaaguuuucuccuacagaagagucaca

SEQ ID NO: 395995 - RNA, 58 nt, Homo sapiens
ugguuauaguguaaucaugcuguaguuauaaaguaauacaguaguaauaguguagcca

SEQ ID NO: 395996 - RNA, 57 nt, Homo sapiens
cuuggucuagugguagcaccagugccugggaaggcacccguuacuuagcagaccggg

SEQ ID NO: 395997 - RNA, 81 nt, Homo sapiens
aucagugcaauacaucguaucaacagaaugaaacauaaaaaucauaugaccauuucaauugauauggaaaaagcaugugau

SEQ ID NO: 395998 - RNA, 55 nt, Homo sapiens
guauugccugugugccagccacucgcccagaguggcccgggcucagaggcagugc

SEQ ID NO: 395999 - RNA, 113 nt, Homo sapiens
gaugaguauaguuugaaucuaugaggauauucacuguuaaguaugaaguaaggcagucucauuguugagcaaacagcuuaacaguguccucaagaauucaggcucuuuccauc

SEQ ID NO: 396000 - RNA, 112 nt, Homo sapiens
gcucuccuugggccuuagugucagcucuaaagauuuauaaagguugcacuggaaccucuuuccaguuguuauuuuuauaaaggaucagugacauuuugaggcagauaagagc

SEQ ID NO: 396001 - RNA, 55 nt, Homo sapiens
uucauggcauuucaagauuuaccagcuuuguagguggugauagaaaugucaugaa

SEQ ID NO: 396002 - RNA, 98 nt, Homo sapiens
cuaaacauaauuaaaugguagagcuuauuuucaaguuuugcuuauuuuuauauguaaagcuuggauuuaggcuaauaaaaaucaggaaauuuguuuag

SEQ ID NO: 396003 - RNA, 85 nt, Homo sapiens
gaucuguucccuggcaugauguguucauugaaaacccuguauagaggaguuucacauuagauaugucauuucuuuuuaacagauc

SEQ ID NO: 396004 - RNA, 62 nt, Homo sapiens
ucaucucugauacugagaccuuggguuaggacuauucugaaaggguuucggauuagcaaugg

SEQ ID NO: 396005 - RNA, 111 nt, Homo sapiens
ggcgcucaccuauuucuugucgguccacaugguucugcccguggguuuucuaaucucacugcucauaagcaagcuugcugggccugacucaugaaggaguggcuugaugcu

SEQ ID NO: 396006 - RNA, 56 nt, Homo sapiens
gggagcaggucaggggcgcuggcaauugaagucuagcuucucccagaccugcuccc

SEQ ID NO: 396007 - RNA, 69 nt, Homo sapiens
ucucccuuugcugaauguuuuucccacagauauuagauaaaauguagaguugucauucagggagggaga

SEQ ID NO: 396008 - RNA, 78 nt, Homo sapiens
cacagggcuaucccagaaacucggguuucucuugagaugccagcugagacucccgucuucucuguggaaagcccugug

SEQ ID NO: 396009 - RNA, 57 nt, Homo sapiens
uuuuauccugagacuuugcugaaguugccuaucagcuuaaggaguuuuaggcugaaa

SEQ ID NO: 396010 - RNA, 56 nt, Homo sapiens
ugggaacaugaagguuaaagagagaaggucaaguuccucauuuaaccgugauccua

SEQ ID NO: 396011 - RNA, 70 nt, Homo sapiens
guucugucccucuagagaaccauaacuauuacagacuuugguaccaggagugguucuagagaaacagaau

SEQ ID NO: 396012 - RNA, 59 nt, Homo sapiens
caugaaugauuuuaaaagccucucuggggucaguggagaaguuaggaaaaucauucgug

SEQ ID NO: 396013 - RNA, 78 nt, Homo sapiens
uagagcaaacaccuguguauacauucauuuauucaaugacuauuuauugaacacuucugugugccagguccuguucua

SEQ ID NO: 396014 - RNA, 69 nt, Homo sapiens
cugaaaguuauuuauugagcauuuaaagggggcaaaaaucuacuuuggccuuucucuaaauacuuuuag

SEQ ID NO: 396015 - RNA, 58 nt, Homo sapiens
ugugugguuuucauauaaucacuccaagcaaaugcgcugaucacaugaaaaccaugca

SEQ ID NO: 396016 - RNA, 106 nt, Homo sapiens
aaaucuguuuuccuucccguuagucuaguucugcccauuggcauuaccuggaucaagucgaaugaccaaugggcagagcuagacugaugggaaggaaaacagauuu

SEQ ID NO: 396017 - RNA, 57 nt, Homo sapiens
ugagacugaguuuugcucguugcccaggcuggagugcaauggugcaaucucggcuca

SEQ ID NO: 396018 - RNA, 59 nt, Homo sapiens
uucuacaggcuguucaagaagcauagcucugacaucagcuucugggaaugccugaagaa

SEQ ID NO: 396019 - RNA, 63 nt, Homo sapiens
ugagcagagaucacggcauuguacuccauccagccuggacaacaagagugaaacucuguauca

SEQ ID NO: 396020 - RNA, 76 nt, Homo sapiens
uggaauccagauaauguuuauccagaggaguuagaagacucuaaauuaccaacugggaacauuauugucuuuucua

SEQ ID NO: 396021 - RNA, 71 nt, Homo sapiens
cagguaaugcuggugcuagaaacuggaagcagaaagauuucuacaguuacucagcucgguagagauaccug

SEQ ID NO: 396022 - RNA, 64 nt, Homo sapiens
ugaguaugaguucaggaaaggcuuucuaagaagguauuauuuaacuucugggcauucauauuua

SEQ ID NO: 396023 - RNA, 128 nt, Homo sapiens
uugauuaaaaucugucuuuaccacuuuaacuagagcccuguguuguucaucuuugacauucccccagcaaaguuggcacugaauugcaauggacaaugcagcagcugcucucagguagaggcccucaa

SEQ ID NO: 396024 - RNA, 94 nt, Homo sapiens
uggauggguauaaggaagguaaauggaacauuauagauguaaaauuaugaauaagauauguacucguguaauguccccugccucagucccucca

SEQ ID NO: 396025 - RNA, 68 nt, Homo sapiens
gugccaucuuaggugaugauugaugugaaguaauauaucugucaauuauucacauaggccuggggcau

SEQ ID NO: 396026 - RNA, 61 nt, Homo sapiens
guagaaugauauguuauguuuagguugccaauauuggcaaccuaaaauuuauauuuuuugc

SEQ ID NO: 396027 - RNA, 68 nt, Homo sapiens
uuuuagauaucaagcugcuuguuugaaucuaucuccgauagauucaagaaaaguuaugauuuaugaaa

SEQ ID NO: 396028 - RNA, 123 nt, Homo sapiens
cauuuugugguaacugauauuuuuaaaaguagggaaugaugaaguaagugcuuaggaugaugccaguuaucuuaucauuguaauuuuauuucuuuaucaagguauauaacuuaucccaaaaug

SEQ ID NO: 396029 - RNA, 59 nt, Homo sapiens
gaacuaauuuacauucccacuaacauuuauacacuguuggugggaauguaaauuaguuc

SEQ ID NO: 396030 - RNA, 70 nt, Homo sapiens
gucuaugagcacauauguaucuaugugcacauuugauaugugugugugugugugagugugugguguaggc

SEQ ID NO: 396031 - RNA, 58 nt, Homo sapiens
gugaauagugcugcaauaaacauacgugugcaugugucuuuauagcagcaugauuuau

SEQ ID NO: 396032 - RNA, 65 nt, Homo sapiens
gucucaccuccaaauaucaucacauuggugauuaggccuucaauauaugacauuuggggguggac

SEQ ID NO: 396033 - RNA, 63 nt, Homo sapiens
ggaaaugguagagaggcugaaauagauaucuacaucuauauagcuaugucuguccauugaucc

SEQ ID NO: 396034 - RNA, 74 nt, Homo sapiens
gcuauugucacauugaugcccaugguggaugggcuaagcauaggcagccaucaggggcuucggguggagauagu

SEQ ID NO: 396035 - RNA, 68 nt, Homo sapiens
uuugugguauguagcaaaagaggugcuuagagugaaauuuguagcacuggaugcacauauuagacaaa

SEQ ID NO: 396036 - RNA, 77 nt, Homo sapiens
gagcugcuugcucuuccaugcuuuccuuaaaaaaugaguuuggcucuccuuuuugaguagcuggagagcagccccuu

SEQ ID NO: 396037 - RNA, 73 nt, Homo sapiens
uuggcauauggcuucuuacucuucugcauguuccgucaugaaacaugcaugagucaaaagagggcagcuccaa

SEQ ID NO: 396038 - RNA, 69 nt, Homo sapiens
uucaggcugauaaaugacaguaauuguucuuaaguugaagagcugguuuaauaugcugucuggccuggg

SEQ ID NO: 396039 - RNA, 58 nt, Homo sapiens
ugcuguuuucccauagcuggucauucucuguuuggcugaaugcuaaaggaaaacagua

SEQ ID NO: 396040 - RNA, 56 nt, Homo sapiens
uggaagacauuuuggaccuugggauacugcacacuucauuuccauuuugucuuuua

SEQ ID NO: 396041 - RNA, 58 nt, Homo sapiens
gcccaagaguuugaggcugcagugagcuaugauuaagccauugcacuccaaccugggu

SEQ ID NO: 396042 - RNA, 63 nt, Homo sapiens
caugccagagacuggguaauuuaugaagaaaaagagguuucauggacucaauaguuucgcaug

SEQ ID NO: 396043 - RNA, 72 nt, Homo sapiens
aaucauuuaugggaaugacuguguugcuaaauuuaacagaguguaacaauagucaguagucucauaaugauu

SEQ ID NO: 396044 - RNA, 65 nt, Homo sapiens
gcugacucaguagguaagacauugccacucacaaggguaagugcuguguuguuaccuaaggcagu

SEQ ID NO: 396045 - RNA, 65 nt, Homo sapiens
acuggauguuagggauuuuauuguaucacuuccaaaauguauauguugaaguccuaaccuccagu

SEQ ID NO: 396046 - RNA, 77 nt, Homo sapiens
cugacuggaucauuacacauucugugcauaugaaaaaauaucacacauacugcauaaauauguguaauauguaucag

SEQ ID NO: 396047 - RNA, 56 nt, Homo sapiens
ggagguagguuugugauuuguagccaaacaccagcugaaguuagcauccuaccucc

SEQ ID NO: 396048 - RNA, 62 nt, Homo sapiens
uuagccuccaaaauuguagaucagcuguuuucaaccucaacacuauugacauuuggggcuag

SEQ ID NO: 396049 - RNA, 81 nt, Homo sapiens
ucagcuaugugaugguucucuucuccucugagcucacucaugaacaucccgucagauggauagucucacucacauacauga

SEQ ID NO: 396050 - RNA, 56 nt, Homo sapiens
uugaagguauauucuguuaaugcuuuauccaggugggcaauuaacauauaccucaa

SEQ ID NO: 396051 - RNA, 94 nt, Homo sapiens
gaagaagagaaaagugaguguccauagaagcuuuggggcucuuccucuaaucaggagaaagcugguguguauuauucacuucuuucuuuucuuu

SEQ ID NO: 396052 - RNA, 66 nt, Homo sapiens
auaaaugucuucuuuugagaagugucuguucauauacuucacccacuuuuugaugaggucguuugu

SEQ ID NO: 396053 - RNA, 91 nt, Homo sapiens
ucugaacucaguucuugcaguucccaaauucacagcuaucuugggauauguugauuugugggcugcaaaauaugagaaauucuaccucaga

SEQ ID NO: 396054 - RNA, 76 nt, Homo sapiens
ucacucuguugcccaggcuggagugcaguggcaugaucucugcucacugcauccuccaccugccaggcucaaguga

SEQ ID NO: 396055 - RNA, 83 nt, Homo sapiens
cugggugggcaucugcugggugcgcuccuguuaugcuuucugcugugacagagaagcauugaguucaguuuaaugucccccag

SEQ ID NO: 396056 - RNA, 128 nt, Homo sapiens
uuccaaaguugcucccacauugucagguuaucuuuauagcaguaccccaguauccugguaccaauuuccuguauuagucuguuuucauacugcuaaaaagaacuaccuaagacuggauaauuaaugaa

SEQ ID NO: 396057 - RNA, 84 nt, Homo sapiens
ggccuccaacuauuuucaguacuucaaaaucuuuaaaggagaacaacgaauuuucuuaagagguaucugaaggcugaagaggcc

SEQ ID NO: 396058 - RNA, 81 nt, Homo sapiens
uuaauggaucuaggcauuaaguggcauugccugccaacaucagcaaagaguggagugcaguugucacgugccuucuguuga

SEQ ID NO: 396059 - RNA, 78 nt, Homo sapiens
uuugcuguuggaaauagugcugcaauaaacauacaugugugcaugugucuuuauaguagcaugugccuuuguaguaga

SEQ ID NO: 396060 - RNA, 82 nt, Homo sapiens
ggcauuaguuagauuuucauaaggagcaugcaaccuagaucccucgugugggcaguucaggcuccugugagaaucuaaugcc

SEQ ID NO: 396061 - RNA, 84 nt, Homo sapiens
ggaucuugcugugucacccaggcuggagugcaguggcgcuaucaugguucacuguagccucagccucuugggcucaagcaaucc

SEQ ID NO: 396062 - RNA, 67 nt, Homo sapiens
gaggcuucagacagaauagacuguuaauguuucuuaucagacuuagagagucuauucuaucagccuu

SEQ ID NO: 396063 - RNA, 86 nt, Homo sapiens
uggaaugccagugagacagaaccauucacuccccuggaaaggcagcugaagccagggagccaaguggucuagcucaguggauccca

SEQ ID NO: 396064 - RNA, 129 nt, Homo sapiens
ccugauuuauuuauucaacaaguauguaccuucccaggcauuagucaaguguacugugaaugaaaaagacaaaaaucccuauuauccagagcuuacuuuuuagcuaggggagguagauaauaaaugagg

SEQ ID NO: 396065 - RNA, 69 nt, Homo sapiens
cuugaacucaggagguggagguugcagugagcugagauugcgcuauugcacgccagccugagcaacaag

SEQ ID NO: 396066 - RNA, 87 nt, Homo sapiens
ccuuauuucaauguuugaagugaguagguacugugagcuauugacccugaaguagguauuacuguuauuccuaucaaacaaaugagg

SEQ ID NO: 396067 - RNA, 87 nt, Homo sapiens
agagguuuuguuuuguuuugagcuagagucucacucugucgcccaggcuggagugcaguggugagaucucggcucacugcagccucu

SEQ ID NO: 396068 - RNA, 91 nt, Homo sapiens
ucuuugggguauugauaauguauucuucaaccuugcuaaacucacuaguucuagcagcauuuuuguagaguauauugaauuuucucaagga

SEQ ID NO: 396069 - RNA, 55 nt, Homo sapiens
aacaguguaaauccagguucgaguacuaaagcuuauaaccgggagugcacauguu

SEQ ID NO: 396070 - RNA, 63 nt, Homo sapiens
uggcagucaaugauauacaaaaguggugguaacaauguuccaaugugauaucaaugauagcca

SEQ ID NO: 396071 - RNA, 89 nt, Homo sapiens
cgaguauacguuagcaugucagucgccacacgucucagugacgugcgcuucagggcacgugggcgaaauggcauccugacuccaacuug

SEQ ID NO: 396072 - RNA, 58 nt, Homo sapiens
ugagacggagucuugcuaaguuacccaggcuggagugcuguggcgcgaucucugcuca

SEQ ID NO: 396073 - RNA, 66 nt, Homo sapiens
uuuucccugugggaguaggaaaguucaucugcacauagcauguuuauuuucauuuccaggggagga

SEQ ID NO: 396074 - RNA, 83 nt, Homo sapiens
uagcauuucuuuaaauguuugguaaaauucagcagugaagccauuggguuucaggcuuuuauuuacugauaaacauuuuguua

SEQ ID NO: 396075 - RNA, 99 nt, Homo sapiens
ggagaccccugggaccuacccucaagcacccuacauaguagauccuacaauauuuuguggcuuagauuuuauguaugggucugcuuccccaugggcuuc

SEQ ID NO: 396076 - RNA, 129 nt, Homo sapiens
uaauaauaaucuguagaagaauguuuaauaaaagauguauacuaggguaguaauaguuguuucaaggcaauggauuguaagugacuuuuauuauguuuaucuguauuuuucuaaaaggaauaugaauug

SEQ ID NO: 396077 - RNA, 86 nt, Homo sapiens
uuguaugauacuaauuuauagcauuuugauccuguagauuuaucaggaucuaucaaggggcauguuguaaucuguaggucaaacaa

SEQ ID NO: 396078 - RNA, 62 nt, Homo sapiens
gugggauguacuauucuagguugaaagauuuuucauucagcacugaaaauaugucaugccac

SEQ ID NO: 396079 - RNA, 76 nt, Homo sapiens
ccauuauugcaaagcguagacucuaaacauauuauuagcaucaaaaaauguuuguuuuguaucuuuguauuaaugg

SEQ ID NO: 396080 - RNA, 75 nt, Homo sapiens
uggcgcacaccuguaauuccagcuacuagggaagcugagacacgagaaucucuuggcggaaguugcagugagcca

SEQ ID NO: 396081 - RNA, 87 nt, Homo sapiens
uuuuguauuuuuuauggcuguuuuuuauguuacagcagcagccgugaguagcuguggcagagacggaauagccuguaaagucugaaa

SEQ ID NO: 396082 - RNA, 100 nt, Homo sapiens
guagcugauuuuuucccucugucuuaaagcucauuaauuagaagcuaacuucccccaguuguagcuuuuuaaugugcugcuuuagaagagcuuucacugc

SEQ ID NO: 396083 - RNA, 70 nt, Homo sapiens
aucguuugaaccugggaggcagagguugcaguuagccaaaauugcacuacugcacucccaccugggcgau

SEQ ID NO: 396084 - RNA, 64 nt, Homo sapiens
aagaugauguuguguuuucacuuuguuggugugaauaguugagugaaaauauccaacucauuuu

SEQ ID NO: 396085 - RNA, 89 nt, Homo sapiens
uuuuuaauuccuuguucaguuuccuugauacuaguuuugguaaagucuaagacuaagacaguauuggcaaaguguguaggaguuaggaa

SEQ ID NO: 396086 - RNA, 68 nt, Homo sapiens
ggguacaugugcacaaugugcagguuuguuacauauguauaaaugugccauguuggugugcuguuccc

SEQ ID NO: 396087 - RNA, 58 nt, Homo sapiens
auguuucccagagcaaaucuggcuucaccaacugcacagaaaaucuuaugggaaacau

SEQ ID NO: 396088 - RNA, 58 nt, Homo sapiens
auugcaacauguauucuggugaucucugaucagggaucuuuuaugucacuguuguaau

SEQ ID NO: 396089 - RNA, 58 nt, Homo sapiens
cuuggucuagcgguagcgucagugccuagggaaggcacccguuacuuagcagaccagg

SEQ ID NO: 396090 - RNA, 63 nt, Homo sapiens
acugguccuagaguguaguuuucuuaggagauguuucucuuaagauuuagacauuuuagcggu

SEQ ID NO: 396091 - RNA, 67 nt, Homo sapiens
uuccaaggugcuauauuucgaggauagugugcucugaccaccauucguggaaucuagcgcacugggg

SEQ ID NO: 396092 - RNA, 105 nt, Homo sapiens
uuggaacuaaaaaagaacuuuggaaaugaucuguuucaauugucuuaguuaaacuuguggaaacuaaaguugaagaaggucaaauuauuuguuuuaauuguccaa

SEQ ID NO: 396093 - RNA, 55 nt, Homo sapiens
ugggcaaaugcuuuuuagucaauccuaggauucuauucuaagaggucguuucuca

SEQ ID NO: 396094 - RNA, 66 nt, Homo sapiens
ucaucaguucuacauccuuauugcacugguuaggaccuccaguacaauguugaguagaagugauga

SEQ ID NO: 396095 - RNA, 60 nt, Homo sapiens
ugugaauagugcugcaauaaacauaugugugcaugugucuuuauagcagcaugauuuaua

SEQ ID NO: 396096 - RNA, 66 nt, Homo sapiens
cuuugaaacuuauuguuaacuuucugucucguugaucugucuaauguugacaguggguuguuaaag

SEQ ID NO: 396097 - RNA, 63 nt, Homo sapiens
gcagggcgcugaaauacuaacauggacagauguguuguacauggcuuuauuuucagcuucugu

SEQ ID NO: 396098 - RNA, 56 nt, Homo sapiens
uugagauggagucuugcucuuguugcccaggcuggagugcaauggcuugaucucgg

SEQ ID NO: 396099 - RNA, 90 nt, Homo sapiens
ggggguuaugaguauuggucuugaaaccagagagaccuggguucaaaucccagcucccuuacuugguugucaaaccuugaacaagucccc

SEQ ID NO: 396100 - RNA, 130 nt, Homo sapiens
guauugcuuuagcuauuuauggucuucuguuguucuauacaaaauuuaggauuuuuuccauuucuguggagaauguaauugguauuuugauagagauuacauggaaucuguagauugcuuuggguaguac

SEQ ID NO: 396101 - RNA, 82 nt, Homo sapiens
cccauuggcauaaacccguagauccgaucuuguggugaaguggaccgcacaagcucgcuucuaugggucugugucagugugg

SEQ ID NO: 396102 - RNA, 71 nt, Homo sapiens
ggugguucuuauggucaggcaaaugguuuaggggugcuuguucuuaaacuugucuaauuauaagcaucacc

SEQ ID NO: 396103 - RNA, 60 nt, Homo sapiens
uuggucaggcuaaucucgaacguccaacgucaggaauguccggugauucgccugcaucag

SEQ ID NO: 396104 - RNA, 76 nt, Homo sapiens
uaguacuaauauaauagcaguguuacuaggacugauaccauuaguuauaguacuaguacugcuugcaguaguacua

SEQ ID NO: 396105 - RNA, 80 nt, Homo sapiens
uauucuguaugauacuguaacagugggugugccucaugacacauuagugaaaacccagugaauguacagcauaaagagug

SEQ ID NO: 396106 - RNA, 64 nt, Homo sapiens
guuuuauaaaugccauaggcaugagauguuuacaucuaguuuuaugcuuguuuauuuaagaaac

SEQ ID NO: 396107 - RNA, 60 nt, Homo sapiens
auaaucacacccagguuaaaugggguguccgucaccucaagcauuuauccuuuguguuau

SEQ ID NO: 396108 - RNA, 92 nt, Homo sapiens
gcaauguaagaaagacaugagauuugggaggggccaggguggaacgauaugcuuugaauauuuguccccuuccaaaucucauguugaauugu

SEQ ID NO: 396109 - RNA, 83 nt, Homo sapiens
agaaagagcuuacgagcaagcgcacuuguguguguguagauaugaacuaaugcauacagaagguguuuucaugagggauuucu

SEQ ID NO: 396110 - RNA, 88 nt, Homo sapiens
ggguugguuccaagucuuugcuauuguaaauagugcugcaguaaauauacaugugcauaugucuuuauaguagaaugauuuauaaucc

SEQ ID NO: 396111 - RNA, 82 nt, Homo sapiens
ggucaggccagaggccccuugcucuccaaauccuuagagagccuccucccugacauucggagauguaguucuggcuuugacc

SEQ ID NO: 396112 - RNA, 65 nt, Homo sapiens
caucuuucuuuuuaaugguauuuuuguagcuuuaucagcugaugaaugcaugaggggaucagaug

SEQ ID NO: 396113 - RNA, 55 nt, Homo sapiens
agcuaaugggagacccuuucacugcauuaguuuugacagaggucuuuuaauagcu

SEQ ID NO: 396114 - RNA, 83 nt, Homo sapiens
uauggagugugugcaaagagcaguugagagugcuggccaagauauugaguaacagccuccgaugcuccacagaacauucugua

SEQ ID NO: 396115 - RNA, 86 nt, Homo sapiens
uguauuccugcauguaugaauacauguacucaugaacauauaacauguacucagugaauacauguacucaugaauguaugaauaca

SEQ ID NO: 396116 - RNA, 61 nt, Homo sapiens
uugucugagauggagucuuguucugucacccaggcaguggcaagaucucagcucacugcaa

SEQ ID NO: 396117 - RNA, 59 nt, Homo sapiens
uuucccucucacacagcaguuuucuuuugaacugaaauauugcccaaaguggaggggaa

SEQ ID NO: 396118 - RNA, 63 nt, Homo sapiens
uuuucccagagagggacuucuaaugaacccacacggacuucaaggaguuuucucuuuggaaag

SEQ ID NO: 396119 - RNA, 64 nt, Homo sapiens
uuuuuuugagauaguacuuuuuaaagagauaguacuuuuuugagauaguacuuuuuuaaaggga

SEQ ID NO: 396120 - RNA, 63 nt, Homo sapiens
gucugcugccuuuuguacagauaugcccugcccccagagguggaaucuagagaggcaguaggc

SEQ ID NO: 396121 - RNA, 101 nt, Homo sapiens
uguauauagauuuaaauaaucagcaccacuuacuguuaauuauuuuagccgugguauuggccuugacguaggaggauguugagaguuuuaggagaugugca

SEQ ID NO: 396122 - RNA, 92 nt, Homo sapiens
ggguuggauuuaaacaagcugcauuuucuagaugcuuaugaugaaugaagagguaagcaaggaaguuguagcuguggguaagaaaacgauuu

SEQ ID NO: 396123 - RNA, 84 nt, Homo sapiens
cuuucaugguggguuccugagacugaggagcuuuggacggaugcuuggcuguugggaaugucccagucacaggacacuguaaag

SEQ ID NO: 396124 - RNA, 58 nt, Homo sapiens
ucuugacaagggagugagucucaaagagggacgcaacccccucacacccuaaucagga

SEQ ID NO: 396125 - RNA, 86 nt, Homo sapiens
uuagauuauuuauagaugugggcaauaagagcuacauuuauguugucagugcuguuugcccucguuuaauuucucaaaugaccuaa

SEQ ID NO: 396126 - RNA, 83 nt, Homo sapiens
aagaggcuuucuaaauguguaauugcaggcaaguaacaacacuugagucuccuucauugcaucuuuaagagagagaaccucuu

SEQ ID NO: 396127 - RNA, 73 nt, Homo sapiens
acagaccuggcgcagugugcagaggagugaaggcacccugcuuuggucuccuuuguacccugggcagaucugu

SEQ ID NO: 396128 - RNA, 86 nt, Homo sapiens
agggaacacaguaaauacaggagugggauuugaguccugguacuccagggccagugcucuucacuguuagguuaaacugauuccuu

SEQ ID NO: 396129 - RNA, 57 nt, Homo sapiens
acuguuucucuccucagcaagacacacuuccugugucuacccugugagggacacagu

SEQ ID NO: 396130 - RNA, 57 nt, Homo sapiens
uguuuucuacuuuguguauugggacaggaacaugacagaauuacaauguagaaaaca

SEQ ID NO: 396131 - RNA, 65 nt, Homo sapiens
gcucagccuugguuucuuguuagagcugauaucaaacuggcucacacugaaacuagggugugagu

SEQ ID NO: 396132 - RNA, 61 nt, Homo sapiens
guaaaaaaagugaugaugucuagggccuuugaguguuguguuugucaucaucuuuucuugc

SEQ ID NO: 396133 - RNA, 68 nt, Homo sapiens
ggguacauaugcacaacgugcagguuuguuacauauguauacacgugccauguuggugugcugcaccc

SEQ ID NO: 396134 - RNA, 64 nt, Homo sapiens
uucuuuggucaucaugggaagcaaggacuuccucagccccugccccucuccugugauccaagaa

SEQ ID NO: 396135 - RNA, 69 nt, Homo sapiens
uuggaaugagaaauauuacacaauugcacugguuuucaugggcuauugucagauauaucucuauucuga

SEQ ID NO: 396136 - RNA, 85 nt, Homo sapiens
guggaaggugugugacaggagguaggaauaaacauuugaaauuaaguuucauauuauuuaucucaugaguaucaauuucauccac

SEQ ID NO: 396137 - RNA, 77 nt, Homo sapiens
cucugggagcuuaagacaguuccaaucuuaccccacacuuccggggauccugauuuaacuggucuaggggcccaggg

SEQ ID NO: 396138 - RNA, 78 nt, Homo sapiens
uuaaaauucagauucuugagcuccugcccucuaaauucaggagggaugggcuagagagcucagggauaugcauuuuaa

SEQ ID NO: 396139 - RNA, 80 nt, Homo sapiens
guuguaagaucaauaaguagaaugauggucaaaagcuacuuguggcuauuggaaauuccugcuuaaaccugacuaauaac

SEQ ID NO: 396140 - RNA, 97 nt, Homo sapiens
augaggaaaagagaaaggacuugggaaagaaguuucaccgauacugguuuaugguucuugagacauuguuuuccaaguuguuuauauacaguuucau

SEQ ID NO: 396141 - RNA, 76 nt, Homo sapiens
uuuucauagugaaaaauucaaaguucaaggggaucuuacaaaucauuucugcaaacuuugcuuucacauaugagga

SEQ ID NO: 396142 - RNA, 56 nt, Homo sapiens
uuaagacaccaaucauuggauuuagggcaaccuaauccauggugaccuugucuuaa

SEQ ID NO: 396143 - RNA, 55 nt, Homo sapiens
gagccaauaagcauguagaagauauggagcaccuauuacuauguaguauuggcuc

SEQ ID NO: 396144 - RNA, 129 nt, Homo sapiens
ugcaagcauuuucaaggaaaggaauguuuguuacaggugauugucuaaucaagauacauuugaaauguauccuuuacuggauagcaacuguaaacaauauuuaaaaaauauaucucagagugacuugca

SEQ ID NO: 396145 - RNA, 86 nt, Homo sapiens
aggucuuuucugagcauauguguagccaugggaaugaauguugccuucuaauuucuuugguaugugcaugugcuuuucaauuaccu

SEQ ID NO: 396146 - RNA, 78 nt, Homo sapiens
cauagcagauaacauuugucgagcacugacaacaugcuagacauuguguuaaguacuuuacagacauuaucuugcaug

SEQ ID NO: 396147 - RNA, 77 nt, Homo sapiens
ggcaguguuggggccggaggcugcugugucugcccaagcuccucucagaguccaguccccaggccuccagcgcuguc

SEQ ID NO: 396148 - RNA, 56 nt, Homo sapiens
gagccuccuccuggucccuauuauaaaagaacaaaguggucaccuucaggagguuc

SEQ ID NO: 396149 - RNA, 61 nt, Homo sapiens
ugggauaucauuauuucuagggcuuuucagugaaaaaagcuaggaaauauguauaucucca

SEQ ID NO: 396150 - RNA, 110 nt, Homo sapiens
gcucccacaaaagucccgaguuucacugugguuggaaggcuuaagccaagugcuuacucuugaaccaaucacuguggcuuaggcugcuucaugugauccacacccggagc

SEQ ID NO: 396151 - RNA, 102 nt, Homo sapiens
uuuaauuugagggaucauagucauugucccucaaugucuaugaccccaauuaaaagggaucauagucauugagggacaaugacuaugaucccucaaauuaaa

SEQ ID NO: 396152 - RNA, 62 nt, Homo sapiens
uccucaaaagaaagagaauuccugaugugaauaucauauuggcaauagcuuucuuacuaggg

SEQ ID NO: 396153 - RNA, 108 nt, Homo sapiens
ucugggccguggcugaggcuucaaggugucuaagagcugcccgggagauuuuacugugcagccuggguagagaaucaggaucuuagagccucuucuguggccaacaga

SEQ ID NO: 396154 - RNA, 90 nt, Homo sapiens
uccauggcaguugucacuuuggcuuuuacugucaugauguugagguucaugagguaguagaaagucaggugaagcacacugucaucugga

SEQ ID NO: 396155 - RNA, 63 nt, Homo sapiens
augcuuuaguuaaaauugggguugucugcaguuaacagagaccccgaauaauugacuuaacau

SEQ ID NO: 396156 - RNA, 76 nt, Homo sapiens
uaggcaaggccuaaucauacugcuaagugacacauaguauaggugcuauuagauguuugacugggccuuaugucua

SEQ ID NO: 396157 - RNA, 79 nt, Homo sapiens
aggcuagagugcagugacaugaucuuggcucacuacaaccuccaccuccuggguucaagcaauucgccugucucagccu

SEQ ID NO: 396158 - RNA, 79 nt, Homo sapiens
ugucaggcauuguucuagaaacuggaguuacauguugaguagaagagauaaacaccauucucuguaacaagaacugaca

SEQ ID NO: 396159 - RNA, 129 nt, Homo sapiens
cucgcuuuuucaacguugugcuccaagcagccauugucaguuaugguuuuucugugagauggaacccauuuuucaucccguauuagaccauauggcuaugagaauuuacagauaggagaaaccagugag

SEQ ID NO: 396160 - RNA, 56 nt, Homo sapiens
gagcuaguaagagguagaguuuggauuggaacccaugaaaucuggcucuacaguuc

SEQ ID NO: 396161 - RNA, 89 nt, Homo sapiens
uucaauacgugagccucaaagucuucucauuaugucuuccacauauuaaaguggaaguaaccagaaggcuuuggaaauucaggucugaa

SEQ ID NO: 396162 - RNA, 59 nt, Homo sapiens
ggauaccaucacugauuauucagggcccaagggcucuuuaguaagcaguugaugaaucc

SEQ ID NO: 396163 - RNA, 58 nt, Homo sapiens
ugauuuguuuagugccaaguuuccagaagacaacaaagugugguacuaaaugaaauca

SEQ ID NO: 396164 - RNA, 99 nt, Homo sapiens
uuuuucauucucucugcaaucuucauggauggaaaugauuuugauaaguuguugaggcagcaguuucaugucuauucugagugcaaagagacugaaaga

SEQ ID NO: 396165 - RNA, 61 nt, Homo sapiens
ugugaacagcuccaaauguggaccucuucucucccaaaugacaaacacauggacugucaca

SEQ ID NO: 396166 - RNA, 83 nt, Homo sapiens
ggucuggugggagguuacuggaucauggggucagauuucccccuuguuguuuucaugauacugaguugaguucucacaagauc

SEQ ID NO: 396167 - RNA, 61 nt, Homo sapiens
ggaauugucuaguacucacggccacuaugacucuaaggugauaugaguucauuagacuucc

SEQ ID NO: 396168 - RNA, 55 nt, Homo sapiens
agcuggcuguagcugcaagucuuauuguccaggagaaacugcagcuguagcagcu

SEQ ID NO: 396169 - RNA, 65 nt, Homo sapiens
gugaccugagagaguacuugauauaauuuugauuuuucuaaauuuauugagacuuucuuuauuau

SEQ ID NO: 396170 - RNA, 59 nt, Homo sapiens
uauuagguuggugcaaaaguuauggcaaaaacaguaauuacuuuugccccaaccuaaua

SEQ ID NO: 396171 - RNA, 88 nt, Homo sapiens
ggagaaucacuugaaccugggaggcagagguugcagugagccgagaucgcaccauugcacucuagccugggugacagagugagacucc

SEQ ID NO: 396172 - RNA, 56 nt, Homo sapiens
uagagacagugaauuuuuauugcuaggucugucagguggugagaaugacuguucug

SEQ ID NO: 396173 - RNA, 130 nt, Homo sapiens
ugagccauaaucacgccaaugcacuccagccugcgugacagagcaagacccuauuuaaaaaaaauuuuuuagagauggagucuugcucugucacccaggcuggagugcagugaugcuaucauauaccuca

SEQ ID NO: 396174 - RNA, 71 nt, Homo sapiens
agaggcauugagcucugucgauugcuuaggccgcauauuucaggacugacauguauuagcucagugcuucu

SEQ ID NO: 396175 - RNA, 65 nt, Homo sapiens
ucacuggccaaauucugggugaguguuccuugacaguuguuuagccauagaaccuuagccaguga

SEQ ID NO: 396176 - RNA, 64 nt, Homo sapiens
agcuaaagccaugcuuagugaaaaauguauacuucaaaugcauauuuuauaaagauggaaagcu

SEQ ID NO: 396177 - RNA, 82 nt, Homo sapiens
guggcacacaaauaguguuuccuucuuuacauguucaaaagagaacaaaggauucuaauggaaaugcuaaauguuuugccac

SEQ ID NO: 396178 - RNA, 60 nt, Homo sapiens
gagacagggucuugcucuguuauccaagcuggauggauuacaguggcaugaucucugcuc

SEQ ID NO: 396179 - RNA, 73 nt, Homo sapiens
uaacucacaguuuguuguuuuuauuucucacuucccuggugagaggugaaggucucaauaaauaaguaaguug

SEQ ID NO: 396180 - RNA, 61 nt, Homo sapiens
caucccuuucugauacuuucccugaaucccagucuggaaaggguaguaaaagaggcgggug

SEQ ID NO: 396181 - RNA, 67 nt, Homo sapiens
ccuggaucaugugucucagcccagaccuauuugugugucuuaacguaaagcugugacugaugcuagg

SEQ ID NO: 396182 - RNA, 60 nt, Homo sapiens
auguucagcuugcagugggggaagauagaaaaucgaaauucacaugacagggugaagcau

SEQ ID NO: 396183 - RNA, 92 nt, Homo sapiens
uguuuagaauuuccauccuaagugguguucauucuuuugaguuaaacaacugauugucaauguacccuugaacauccugggaguucaaagca

SEQ ID NO: 396184 - RNA, 58 nt, Homo sapiens
ccaucacaugcuuauuuuccucauuggaaauucagaugaggacagaaagguguggugg

SEQ ID NO: 396185 - RNA, 69 nt, Homo sapiens
ugacaaccacacugaagaaacagugaaucaguauuuguuuugagcacuguacuuuaucagguacuguca

SEQ ID NO: 396186 - RNA, 56 nt, Homo sapiens
uucagugucauuaacacaguagugggugcaaaacacagaacuguuaguacacugga

SEQ ID NO: 396187 - RNA, 102 nt, Homo sapiens
ugagauggagucucgcucuugucacccaggcuggagugcuguggcgcgauuccggcucauugcaaucucugccucccggguucaagugauucuccugccuca

SEQ ID NO: 396188 - RNA, 84 nt, Homo sapiens
aaagccuuucuggccgguauuugccucugggggcugcaucaucgucuacccagaguucuuaaauacugagcaacuuaagguuuu

SEQ ID NO: 396189 - RNA, 59 nt, Homo sapiens
ucuuuuaaggcaggucugguggugacaaaaugucucagcauuugcuugucuguaaagga

SEQ ID NO: 396190 - RNA, 85 nt, Homo sapiens
ugauuauguugauucugugaauuucuacagggcagguauuuuuucucaauuaagccauuucugagguucacagagguuaugauua

SEQ ID NO: 396191 - RNA, 91 nt, Homo sapiens
ugcaaugugagaaagacaugaaauuuggggggccaggguagaaugauaugguuucgauguuuguccucuccaaaucucauguagacaugua

SEQ ID NO: 396192 - RNA, 57 nt, Homo sapiens
gaggcagucugucccuuagcagagcucgaguacugugcugggugaucagcugcucuc

SEQ ID NO: 396193 - RNA, 66 nt, Homo sapiens
ugaauucuguuagaagguaguucagcacacccucauuuauggacugaaaugccuuuaaugaauuua

SEQ ID NO: 396194 - RNA, 72 nt, Homo sapiens
ucuuuuuagcagcaccccacucuacugguaccaauuuauuguauuaguuuguuuucaugcugcugauaaaga

SEQ ID NO: 396195 - RNA, 86 nt, Homo sapiens
aguaucacccccaucuccccaguuaugacaaccaaaaaaugccucuaauuuuugguugucacaacugggggaaugggggugauacu

SEQ ID NO: 396196 - RNA, 59 nt, Homo sapiens
ugucagauaaagaacuggaaagucuacucuuguaggcugacagugguuauacuuagaca

SEQ ID NO: 396197 - RNA, 60 nt, Homo sapiens
uaugccuuucucacuaagcuuaauuguuuuuagcuuuugacuuaaagugagagaugugug

SEQ ID NO: 396198 - RNA, 63 nt, Homo sapiens
ugagauuugggaggggccaggagcagaauaaugugauuugguuguguccccacccaaauuuca

SEQ ID NO: 396199 - RNA, 84 nt, Homo sapiens
uauuagguuggugcaaaaguaauugugguuuuugccauuacuuuaaauggcaagaacaacaauuacuuuugcaccaaccuaaua

SEQ ID NO: 396200 - RNA, 84 nt, Homo sapiens
uucaaaaugguggcuccauguucccuucucuuugccagccauguguacaguaaggaguagacaacauggcgccagccaagugaa

SEQ ID NO: 396201 - RNA, 59 nt, Homo sapiens
gugcacuguagaacccuuuguuguuauugccuguguaacaucaaguggaacuacagcac

SEQ ID NO: 396202 - RNA, 56 nt, Homo sapiens
ucaacaucaaccaugaggguuggaaucaacuucuucuaaacuccaguuaauguuga

SEQ ID NO: 396203 - RNA, 76 nt, Homo sapiens
uguugaguuaugccaaaaguaggccccaacagguuuugaaaggcagauguuugguaagaauauuguuaauucagca

SEQ ID NO: 396204 - RNA, 57 nt, Homo sapiens
gaagcucuuguugaaucuugucaugacacgcaugacuccugagauuacagagccuuc

SEQ ID NO: 396205 - RNA, 71 nt, Homo sapiens
guaaauggauauugccaucuccuuuuaaaauuaugcauuuaggaaagaauaggagaggcaguuuccuuugc

SEQ ID NO: 396206 - RNA, 56 nt, Homo sapiens
uauauacuaugcgauuccugccuuaaaaacugcaggaauggcaccauuagcauaua

SEQ ID NO: 396207 - RNA, 82 nt, Homo sapiens
ggggagggagagcugcuaauuuucauuuucaugaggucuugggauuacuuggcauggagugagaauggagguuccccuuccc

SEQ ID NO: 396208 - RNA, 82 nt, Homo sapiens
cacaaugugguugaaagagcauggacuugaaauucaggcuggucugguucaagucuuggcuuugccaccuacuaaccaugug

SEQ ID NO: 396209 - RNA, 67 nt, Homo sapiens
uagguauuacauguccaacucccaauuccccuccaaacuagaccauggauagggcaugugaagccua

SEQ ID NO: 396210 - RNA, 103 nt, Homo sapiens
cauauaaugaaacgugguuuuguuauuguuguuguuuugccucagcaacguuauaaggaaaugacauugagcaaaacauuaauauuagaggaccuguuauaug

SEQ ID NO: 396211 - RNA, 55 nt, Homo sapiens
caagugaauaguugcucucagauaaauagaauauaggaaggcauggguuuacuug

SEQ ID NO: 396212 - RNA, 105 nt, Homo sapiens
ugggaggaugguuugagucugggagguggagguugcagugaugaagugagcugugauugcaccacugcacuucagccuuggcuacagaguaagaccguuaucuca

SEQ ID NO: 396213 - RNA, 121 nt, Homo sapiens
uuggcuuccuuuugcuuguguuacaagaggaccuuugggggcauauuagcuugcuuguuaagaccaaugaguaaaucacuaauggcuuccggccacuuugcauacauccaagaauaguuga

SEQ ID NO: 396214 - RNA, 60 nt, Homo sapiens
gaugcuaugucuucucucacagagaaaacuauuuauuccggagaggagaacauggacauu

SEQ ID NO: 396215 - RNA, 72 nt, Homo sapiens
ucugcccuggcuuccagcuggguucagucagugaaaggcacuggcagaagacugaguugggauaggguaaga

SEQ ID NO: 396216 - RNA, 130 nt, Homo sapiens
aguugacaacauuuguuauuacuauguccacugcucaucauuaccagucugauaaacagaaagugguaugcccucuauuugcuguuucuagacuguaaaugaguuugaauaauuuuucacaaauuuagcu

SEQ ID NO: 396217 - RNA, 58 nt, Homo sapiens
guucaguuugcugaugcguugagaauuuuuacaucaauguccaucagaaaaacugagc

SEQ ID NO: 396218 - RNA, 71 nt, Homo sapiens
gaaaguuguuguuguccaguguuauaaucacagaacuaaaagugauggcacuaaguucaacacuuauuuuc

SEQ ID NO: 396219 - RNA, 66 nt, Homo sapiens
uaugucugcggacccuuacuaccugugaaugggguguuauugagaaauaggguguuugcagaugua

SEQ ID NO: 396220 - RNA, 103 nt, Homo sapiens
ucuguccuuaacgcuaguaccacacuguuuuaguuauuauagcuuuucaguaaguuuugaaauugagauguguuaguucucccacuuugcuguucauuauaga

SEQ ID NO: 396221 - RNA, 63 nt, Homo sapiens
acuuguuuucaugggaucacaggcuguuccucugggagaugcuaggagagaugaaacacaggu

SEQ ID NO: 396222 - RNA, 79 nt, Homo sapiens
aggcuggagugcaauggcaugaucuuggcucgcugcaaccuccagcucccggguuuaagcuauuguccugccucagccu

SEQ ID NO: 396223 - RNA, 91 nt, Homo sapiens
ggcuugcccaggaauugcaacuguugagguauagaacaccuuucaaguuuauuuagaaacccaaagugcuuuauaccacaguggugaagcc

SEQ ID NO: 396224 - RNA, 60 nt, Homo sapiens
uacggggguggugggaucauuagaagcccaaaccucgguaucgcacaauauaccccugua

SEQ ID NO: 396225 - RNA, 55 nt, Homo sapiens
ucccauaggcuuuuucacccagaauccucaucuuuugagguaaaauccuauggga

SEQ ID NO: 396226 - RNA, 59 nt, Homo sapiens
cuuaguguuacuaugugccaagcacucuugugagugcuuuguacagcuugacuacuggg

SEQ ID NO: 396227 - RNA, 84 nt, Homo sapiens
ggcccagccugccaaggagucagucccuagagaucuccaggagaagcccuucuagggagacgcccuggucuaggcauguggguc

SEQ ID NO: 396228 - RNA, 79 nt, Homo sapiens
uugguuuuuuguccuugagauaguuugcagagaaugaugguuuaaauuuuugcaaucuacucaucugacaaagggcuaa

SEQ ID NO: 396229 - RNA, 61 nt, Homo sapiens
acauguauguaugcacauauguacugcccuauuucaaagaaauagaugugcacauagaugu

SEQ ID NO: 396230 - RNA, 65 nt, Homo sapiens
ugguuggucucguauaaaucaaggguguuuauucacacauucaacgaguuuuugagcaccaacua

SEQ ID NO: 396231 - RNA, 55 nt, Homo sapiens
guuggaauuacaggccugagccacugcgacuggccccauggcuuauaauuuuaau

SEQ ID NO: 396232 - RNA, 61 nt, Homo sapiens
ucuucucuucccuacccugauguuccaugauccugaagaagauaucagggugaagagagga

SEQ ID NO: 396233 - RNA, 67 nt, Homo sapiens
uagguagugugugcaugagaggcagaggaucugaguaacccuggccuuauuucuugcacauaaucua

SEQ ID NO: 396234 - RNA, 58 nt, Homo sapiens
ugagcggcuuucaaaucuggcaucagguaauaacuuguuugccaagaaagucagcuua

SEQ ID NO: 396235 - RNA, 115 nt, Homo sapiens
ucuauuuuuuuaagguacuggugcccauauaguaguacuguuagguuuucuuuccauuuaugaauuuggcauuaguacucuguaaugcacccauguuggaccauaaaacagugga

SEQ ID NO: 396236 - RNA, 79 nt, Homo sapiens
ugcaucucuggugagguaguaagguacaauacuagcacuccaccuagugucuaucuaugauacuucacacucugaugca

SEQ ID NO: 396237 - RNA, 75 nt, Homo sapiens
cuucagcaggccaggcccugacuggaugcuggcgagucgagaaaaacacaaucgggccuccggccuugucugagg

SEQ ID NO: 396238 - RNA, 78 nt, Homo sapiens
ccagguucuuuucaccuugagauguugcucugaaacaaggggccuccaaagcuccugcagcaggggaagagagccugg

SEQ ID NO: 396239 - RNA, 64 nt, Homo sapiens
guaacaccaguuauaucaguucccauaauugaaaacuguggcaaaauauaauugcugguguuac

SEQ ID NO: 396240 - RNA, 56 nt, Homo sapiens
ugugcgaaaaccacaguagagguuuugugaagaagagcauuuguggcuuuugcaca

SEQ ID NO: 396241 - RNA, 101 nt, Homo sapiens
gucuagcuacuuugcacauccauguuugacuuuuaggaggaaaaugacaacuaaccaaguugagucaauguccaaucuuaaaaguccgugauguguuggac

SEQ ID NO: 396242 - RNA, 119 nt, Homo sapiens
auacgugguuucacaaggugugcggugguagggaguugauaugcuugucaguccauuugaaucucaugauggcauugaauguguguuuccccuuugcagugaaccuggagaccaugugu

SEQ ID NO: 396243 - RNA, 61 nt, Homo sapiens
ccaaaguggagaguccccacuagcaagaagacuuuugccagaugugcccucuccaccuugg

SEQ ID NO: 396244 - RNA, 76 nt, Homo sapiens
aaugagauaaucuggguaaugcauuuagcauauggcuggcaugaaguuaagugcucaguuacucaguuauuauauu

SEQ ID NO: 396245 - RNA, 66 nt, Homo sapiens
gugucuuguagacaauguauaguuuuaguuugguguuuugcuguuauuguuguuguuuugagacac

SEQ ID NO: 396246 - RNA, 72 nt, Homo sapiens
ggcucccuauuagauuucaccauaaugcauagaaguuagaacuuucucugguuuguggaaucuuaggaagcc

SEQ ID NO: 396247 - RNA, 77 nt, Homo sapiens
aacauacuauaaacuacuacuuucugacaucuuuaaugucucuuuuguuguaggauguugacaguagaaagaauguu

SEQ ID NO: 396248 - RNA, 87 nt, Homo sapiens
cugcugaagggagaagaauuugggauuugaguuggaagucauguggcccuucuguacuuccguaccuaaaguuuuccccauuaguag

SEQ ID NO: 396249 - RNA, 56 nt, Homo sapiens
auaagagcaggcuucuggccagagugagugcagcucugccuugaagcaacucuugu

SEQ ID NO: 396250 - RNA, 71 nt, Homo sapiens
gguucucuguuuguuuaggguacucagaauauuacucagagauaucugguuacuuuccuaaagaacaaacc

SEQ ID NO: 396251 - RNA, 85 nt, Homo sapiens
gggauggauuuggaguugauaaaaugauaucuucuuuaugaaauagaaguaaggaguaucuguuuucucacccaaguauaguccc

SEQ ID NO: 396252 - RNA, 90 nt, Homo sapiens
uguaagaaagacaugagauuugggaugggccagugcuggaauaauaugguuuggcuuuguguccccacucaaauuacauguugaguugca

SEQ ID NO: 396253 - RNA, 83 nt, Homo sapiens
ggcuccagagaucacaguuggcaaguggcugagcugggacgguauccagcucuaucugguuccaaagucuggucucuaaggcc

SEQ ID NO: 396254 - RNA, 85 nt, Homo sapiens
ggagaaucgcucaaacccaggcagagguugcagugagcugagauugugccacugcacucuagcauggguaauaaagcaagacucc

SEQ ID NO: 396255 - RNA, 97 nt, Homo sapiens
gccuccauaggagagugugugauguaaagaacuggggauguagcaguucaguuacugcaauuccucagcuuuuauuucacuugccuuuuagaugggc

SEQ ID NO: 396256 - RNA, 67 nt, Homo sapiens
uuauuagguuagugcaaaaguuauugcaguuuugcuauuaaaaguaacuuuugcaccaacccaauag

SEQ ID NO: 396257 - RNA, 56 nt, Homo sapiens
agaucuggaagccacuguuucgaaggcaggucagucuuuugaauaguguccaaucu

SEQ ID NO: 396258 - RNA, 67 nt, Homo sapiens
agcauuaugccucuucauaaaguaugaacuuaaauuuuucaugcguuagagaauugggguuaaugcu

SEQ ID NO: 396259 - RNA, 72 nt, Homo sapiens
guugcucucauaucauugcaugcauauggcuuggugaccccaaggccaagucuacugcauuucaguagcaac

SEQ ID NO: 396260 - RNA, 66 nt, Homo sapiens
uguuuauuuauaccuggucucauuccacaagggauuuguggagugugauucaguauaauauaaaua

SEQ ID NO: 396261 - RNA, 59 nt, Homo sapiens
ggagacaaaguuagaagcuggcuaucaguuuaaauuucuagucaguuuauuuucucucu

SEQ ID NO: 396262 - RNA, 69 nt, Homo sapiens
uaaaguggggaaaguugugacuuuaaaccucacauguauuacaccuuaaucauagcuuuuuccacuuua

SEQ ID NO: 396263 - RNA, 56 nt, Homo sapiens
uaugccuuuugguucaagcaacauauauggcaauguuucuugagccaaaaggcaua

SEQ ID NO: 396264 - RNA, 68 nt, Homo sapiens
uacagcaaauguaugugguauacagaacaaugcuguauagcccuuuucuaacuauguguauuucugua

SEQ ID NO: 396265 - RNA, 76 nt, Homo sapiens
ccgcccucagugucuggggccccagggcagagggucaccaucuccugcacugggagcagcuccaacauuggggcgg

SEQ ID NO: 396266 - RNA, 80 nt, Homo sapiens
auacauauacauuugcuuguguggguguacgugugugagagaaggagaaaguauauccauguggauaaauguguaugugu

SEQ ID NO: 396267 - RNA, 129 nt, Homo sapiens
uuaaaguaaauguggcagaaugaaaguuaagcauagaaucuguuagguuaaggaauggcaaaaaccgcaauuacuuuuguuccaaccuaauagaugauggguauagcauuuuuugaacaauucuuuugg

SEQ ID NO: 396268 - RNA, 60 nt, Homo sapiens
aucagugauugauuuaaagacgugauuggauaacacuugucuguugauugaauuacugau

SEQ ID NO: 396269 - RNA, 71 nt, Homo sapiens
ggauuugguuugccaguauuuuauugaggauuuuugcauugauguucaucagggauauuggucuaaaauuc

SEQ ID NO: 396270 - RNA, 79 nt, Homo sapiens
aacccaugagauauuuagaaauguguucuuuaauucacaaauauuuaaggauuuucucgauaucuuagugucauugguu

SEQ ID NO: 396271 - RNA, 130 nt, Homo sapiens
gggcccggagggcagcucacugggguugaggcugugaggcacugcugcuuuccaggagaacgaacucagcacacagucuggggcagacaguccuucagcucuucucacuguguguuucucuucugggucc

SEQ ID NO: 396272 - RNA, 73 nt, Homo sapiens
ggcuguccaagaagggaaggaagcugagggugaaggagggagccugacccucagaccaguuucccuggcagcc

SEQ ID NO: 396273 - RNA, 95 nt, Homo sapiens
cuguuauuaauuaauugauugauuuugaggcagggucuuacucucauauauuuuuucuuggcugauauuauuuaauguaauugauugauugacag

SEQ ID NO: 396274 - RNA, 64 nt, Homo sapiens
cucaaauauggcagcccucuuuauccauggagaucuguuccaagacucccgggggcugccugag

SEQ ID NO: 396275 - RNA, 70 nt, Homo sapiens
aucuauuagacaucugaauaaggguaagaacaggcaguuaauaccugagucuagagucuagaaaauggau

SEQ ID NO: 396276 - RNA, 75 nt, Homo sapiens
agcaaccaagauaucccuguauaagugaauguauaaacugugguacauuuagaugauaggauauuauugagugcu

SEQ ID NO: 396277 - RNA, 67 nt, Homo sapiens
guaugaaguuggacuguauaaauuuggccuacaaaaaacggcaauuuuguaugguugaacuugauac

SEQ ID NO: 396278 - RNA, 81 nt, Homo sapiens
ucuucagccuugauccucagcaaaggcaaagugccuagcacauaguagguacucagugacugguggaucaauacuauuaga

SEQ ID NO: 396279 - RNA, 120 nt, Homo sapiens
acuaccaggagagauugggguagggcaggcugagaaauauacuacuccugugugcucgggaagaaaauauauugucucugccuugucuggacucucaguuuaccuucucuccucuguggu

SEQ ID NO: 396280 - RNA, 67 nt, Homo sapiens
aaucccagugugaacuuggcauuuucuaauuauuucauaaaugagaauaucaaaucacauugcgguu

SEQ ID NO: 396281 - RNA, 77 nt, Homo sapiens
ggcagaggaagcagcuggccugagcgguggcgggugagggcaacacgcugucacugggaggggcagcagucccugcu

SEQ ID NO: 396282 - RNA, 75 nt, Homo sapiens
ggggcuauugaaugguuggguuaaagaggauauggaaacugcauucuuuugugagucagccucuccugggguccc

SEQ ID NO: 396283 - RNA, 80 nt, Homo sapiens
uuuugguaaaucguguaacuuagugugcuuauaugcaacuuaauuaauguaaagguuuauaaaguaggcuaauaccaaaa

SEQ ID NO: 396284 - RNA, 118 nt, Homo sapiens
ccugguacugauguaaauucugguacguaaauucugagugcaucuuuaucuuauagcagaaaaguauaaccuauggaucuacucggguacuugauuuuaaaugcucuuaaaucccagg

SEQ ID NO: 396285 - RNA, 63 nt, Homo sapiens
uuuguaucugcagucuaucacugacagaaacacuggugugcagugcaugacuguauaugcaaa

SEQ ID NO: 396286 - RNA, 62 nt, Homo sapiens
agcauuucuacugugucagaaauucucaaacuuuagaguguaacugaaacacagagagggcu

SEQ ID NO: 396287 - RNA, 95 nt, Homo sapiens
aaauaucccuuuuuauggccaauccucagaagucuugcagagucacuaaggccagcucggauucgaggguaggggucauauagaggggaauguuu

SEQ ID NO: 396288 - RNA, 74 nt, Homo sapiens
gagguccuucacaucccuuuaaguuggauuccuauguauuuuauucucuuugaagcaauugugaaugggaguuc

SEQ ID NO: 396289 - RNA, 58 nt, Homo sapiens
acccaggauggagugcagugacgcaaucacagcucacugcauccuugaccuucugggu

SEQ ID NO: 396290 - RNA, 60 nt, Homo sapiens
gucagaugaguagguagcaaaaauuuucucccauucuuuagguugccuauucacucugau

SEQ ID NO: 396291 - RNA, 66 nt, Homo sapiens
ucccugacagucacagagcuacaugaacacccauaaaaguggguuuuagcuugucgcagucagggg

SEQ ID NO: 396292 - RNA, 59 nt, Homo sapiens
gagauauguuggcagcugguaugcacuucaucagagggcaaauuacugccacacauuuc

SEQ ID NO: 396293 - RNA, 61 nt, Homo sapiens
gucccuucugccaugugaggacacaacaaaaugacagcugucucucaaccaggaagugggc

SEQ ID NO: 396294 - RNA, 59 nt, Homo sapiens
uguguuauuugguuauuguaauugggauuuuucccauugcauuuaucaaauauuuaaca

SEQ ID NO: 396295 - RNA, 55 nt, Homo sapiens
aauacccuuguuaauuuacugucuuaaugauagucugauauugacaguggguguu

SEQ ID NO: 396296 - RNA, 60 nt, Homo sapiens
gagcuaagggaggaagcugugcagggugaggucaucccccucacgguccucccugggcuc

SEQ ID NO: 396297 - RNA, 130 nt, Homo sapiens
cacacaggccucgggccucugggaagcaagugcauucuugggccucuguuuagaagguaucaaagagcuaccuaacaggcuccuaggggugcaccuugugguucacugaugggcucgcagagccagugug

SEQ ID NO: 396298 - RNA, 72 nt, Homo sapiens
ccagcgaugaggccaacacuaucccgcuagcuuucuaaggaaaucugguguauuggugcugggucaugcugg

SEQ ID NO: 396299 - RNA, 82 nt, Homo sapiens
ugguuuggugagcaaggguaggggccagagggaaguagaugaauagucuugccacaucccuuucccacccuucacagggcca

SEQ ID NO: 396300 - RNA, 70 nt, Homo sapiens
ugauuugggaguauugcuugagcccaggaguuugagacaagcuugggcaacacagcaagaccccaccuca

SEQ ID NO: 396301 - RNA, 57 nt, Homo sapiens
agagaaauguacaguggaucauaugauucuuucaguuugagcucaugacauuuuucu

SEQ ID NO: 396302 - RNA, 74 nt, Homo sapiens
ccuggugugguggcucaugccugccuucucagcuacuugggaggcugaggugggaggauuggcuugagcccagg

SEQ ID NO: 396303 - RNA, 60 nt, Homo sapiens
cugagcuuguuuucccauaacuagauggucccaucugggggugaugggaaacagugacag

SEQ ID NO: 396304 - RNA, 81 nt, Homo sapiens
cuagggcuaauuaugcuaagugaaauaggccggucacagaaggacaaauaccacacgauuccacuuacaugaaguaccuag

SEQ ID NO: 396305 - RNA, 62 nt, Homo sapiens
guguuaaauggcagggagcgucccgcaagauuccucugugguugagcuuugccaugaggcac

SEQ ID NO: 396306 - RNA, 84 nt, Homo sapiens
agucuugcucuguugcuuaggcuggagugcaguggcgcaaucuuggcucacugcaaccuccgccucccagguucaagcgauucu

SEQ ID NO: 396307 - RNA, 59 nt, Homo sapiens
guggcauacagcagacaccuuugggugaauuagaagaaggugcucuuccuguaggucac

SEQ ID NO: 396308 - RNA, 98 nt, Homo sapiens
guagcauaggucuggugucaaugaaaucucuuuugucugucuggaaaggucuuuauuuuuccuucaugcuugaaggguauuuucaccagauauacuac

SEQ ID NO: 396309 - RNA, 109 nt, Homo sapiens
ggacauuuauagcagaaauaugaguauucagugcgugcauagccuggauuauaucgugagaauaaucugguguauauaugcaccauucagucuuaaugcacaagugucc

SEQ ID NO: 396310 - RNA, 78 nt, Homo sapiens
ucuuucaucuuugcugauugucaucaauauuauuaccaaucuugguaguacuuuaggugagaguaaugagauugaaga

SEQ ID NO: 396311 - RNA, 110 nt, Homo sapiens
aguaggccucaguguuuuuuguucucuauguguccauguguucucaucauuaagcucccacuuauaagugagaacaugugauauuuggugaucuguucuguuaguuugcu

SEQ ID NO: 396312 - RNA, 61 nt, Homo sapiens
ucuuaguucauuauguguugcucagguaacacaauaccugagaccagauaauuaauaaaga

SEQ ID NO: 396313 - RNA, 65 nt, Homo sapiens
uuagccaggcaugguggugugugccuauagucauagcuacuagucauagcuacuugggaggcuga

SEQ ID NO: 396314 - RNA, 58 nt, Homo sapiens
ccugugaugaagaguccaagaacagccugagauaaggaugucauucuucuuucacagg

SEQ ID NO: 396315 - RNA, 88 nt, Homo sapiens
ugcccauuggcuuauagauuaucuaugugcuuucacuaaugcaugauagcuuaguaguugugauagguaccuuguaggccacaaagca

SEQ ID NO: 396316 - RNA, 81 nt, Homo sapiens
uugccauguucauuacagcaucauuuacaauggccaagauauggaaccaaccuaaaugacugucaguagaugaauggguaa

SEQ ID NO: 396317 - RNA, 70 nt, Homo sapiens
gagacagggucuugcucugucgcccaggcuguguaguggcgcgaucucggcucagugcaagcucugccuc

SEQ ID NO: 396318 - RNA, 91 nt, Homo sapiens
uuggcuuuuuuuuuuuugguugcauucacauauuucaucuagugguauauuucuuaauguacaggagguaugaagucaacuaguuguccaa

SEQ ID NO: 396319 - RNA, 91 nt, Homo sapiens
gcgcccagauggaaucuacauuucuuaaggaggagcaugaaauaucgaagcuaugaagggauucuuggagugugucuuauuccauuggugc

SEQ ID NO: 396320 - RNA, 72 nt, Homo sapiens
uuucucuucucuagugauuagcaccucauguguaaaacgcaaugaguaugagaauacauuaagagaaagaaa

SEQ ID NO: 396321 - RNA, 70 nt, Homo sapiens
auucaccauuucuugcugaaacaaauaaaccagaauuaacuguguaucuauucagcaaaggaaugggagu

SEQ ID NO: 396322 - RNA, 66 nt, Homo sapiens
ucucuuucccaguucacagaaaugcucugagcaccaugcuaccauugcaguggaguggggaagagg

SEQ ID NO: 396323 - RNA, 78 nt, Homo sapiens
cucugcccagugggcacugcucugggcacaucaggcgcuguccucugcacaguccagugcccacugaggaaggcaggg

SEQ ID NO: 396324 - RNA, 80 nt, Homo sapiens
uguuaugggaaauggcaaguucuaaugauuagaauagcguuuuacuuuaauuaaugaacuguggcaggaagcccaaggca

SEQ ID NO: 396325 - RNA, 74 nt, Homo sapiens
ccuauugcauccauucuagacucaucuaaaccacccauugcuggucaagagaggucuaaaaugguugugguagg

SEQ ID NO: 396326 - RNA, 86 nt, Homo sapiens
cuauuaguuuggugcaaaaguaauugcaguuuuugcaauugaagguaauggcaaaaaccgcaauuacuuuugcaccaaccuaauag

SEQ ID NO: 396327 - RNA, 71 nt, Homo sapiens
acuguggaaaugacuuuaaguagucauaguuaaagacacaauugacaagcauauuugguuauuuccauggu

SEQ ID NO: 396328 - RNA, 66 nt, Homo sapiens
acguuuuauaacuggaugacacuugagcuauuugugguagucaagugguuucugaguugggggcgu

SEQ ID NO: 396329 - RNA, 79 nt, Homo sapiens
aagcaaauauacccuguaguuagaaacuuucaacugaacauguuagagaccaaguuuaacuucaggcaugcauuuguuu

SEQ ID NO: 396330 - RNA, 77 nt, Homo sapiens
ccuuggcucaaaaccuuccaguggcagccgggcaugguggcucauaccucucaucccagcacuuuuggaggccgagg

SEQ ID NO: 396331 - RNA, 69 nt, Homo sapiens
ugugccaugaggcucugauaugugcccugcacuguggggggugccaaaaauuagagcuacauggcuaca

SEQ ID NO: 396332 - RNA, 71 nt, Homo sapiens
auuguacuagguccuagggcuuaaaaggugauuaaaacaucaucccuacccuagagagcuuacaguacagu

SEQ ID NO: 396333 - RNA, 84 nt, Homo sapiens
gagguuugggguaugauuaaacucaucacccagguaguaaggauaguaccugauagguaguuuuucaacucuuaccccuuccuu

SEQ ID NO: 396334 - RNA, 57 nt, Homo sapiens
uugcaugggagcugggugaggccuguaacugccagcuuucccccacuucccugacaa

SEQ ID NO: 396335 - RNA, 103 nt, Homo sapiens
cugaggcaggagaaucacuugagcuugggagguggaguuugcagugagcugagaucaugccacugcacuccaaccuggacaacagagugagacucugucucag

SEQ ID NO: 396336 - RNA, 64 nt, Homo sapiens
guaaguaaguaagagguauuacaugcugucauagcagaauauaccucuuacuuucagcacuuac

SEQ ID NO: 396337 - RNA, 57 nt, Homo sapiens
caaaagugguucuuauccuuuuauuuucucuucuuagaggagacagaaaagcuuuug

SEQ ID NO: 396338 - RNA, 75 nt, Homo sapiens
ggcaugcuuuuaugaacuaggccuagaaguugaguauuuauucaugcuuuuaugaacuaggccuagaaguuggcc

SEQ ID NO: 396339 - RNA, 62 nt, Homo sapiens
ggaaaggaaaaccagcauuugcucaggcagccucucugggaagaugcugcuucuuccucucc

SEQ ID NO: 396340 - RNA, 93 nt, Homo sapiens
gagaauugcuugaacccgggaggcagaaguugcagugagccaagaucgcucuacugcacuccagccugcccaacgggagcaagauucccucuc

SEQ ID NO: 396341 - RNA, 72 nt, Homo sapiens
ugagggcggguguuuuacccuugcagagacauuuucuugaauucuggagggcccacauccacaaugcccuca

SEQ ID NO: 396342 - RNA, 60 nt, Homo sapiens
guuuucaugaacgccuccuggcucuguuuagaggguuccgugagagaguucauagaaagc

SEQ ID NO: 396343 - RNA, 63 nt, Homo sapiens
ccuucauagucacauucgaugucuccuacaaggccacccugggagacaggaugcuuaugaggg

SEQ ID NO: 396344 - RNA, 77 nt, Homo sapiens
uuugcuuuuuauugcuuaugauuagguguuauggcuuucauggacaauauaguugaaugagcaagcacugaaguaaa

SEQ ID NO: 396345 - RNA, 57 nt, Homo sapiens
gagccaagaucgcgccauugcacuccaaccugggugacaagagcgagacuuggucuc

SEQ ID NO: 396346 - RNA, 76 nt, Homo sapiens
ggaagaugggugguccuuacaggaggcuuacucauaggugugaagugaccucauuacggggccugcuccaucuuuc

SEQ ID NO: 396347 - RNA, 64 nt, Homo sapiens
uguccugcagagguguuugccuucucaguacaccagcuaggcacuucccaacucugcaggcaca

SEQ ID NO: 396348 - RNA, 73 nt, Homo sapiens
cucuugaacccaggaaguggagguugcagugagcugagauagcaacacugcacuccagccugggcaacaagag

SEQ ID NO: 396349 - RNA, 55 nt, Homo sapiens
cuucuggaagcuccaaggaagaaucuguuucuuugcgcuuugcagcuuccagagg

SEQ ID NO: 396350 - RNA, 82 nt, Homo sapiens
aggaaugcagagugcagagggaagaguaagauggcggucagcagccagaaucaagcucguccccuccugacucugcaaaccu

SEQ ID NO: 396351 - RNA, 81 nt, Homo sapiens
gccccgccaacccaguguucagacuaccuguucaggaggcucucaauguguacaguagucugcacauugguuaggcugggc

SEQ ID NO: 396352 - RNA, 71 nt, Homo sapiens
gcuugaaccugggaggcagagguuguggugagccaagguugcaccacugcacuccacccuggcaacagagc

SEQ ID NO: 396353 - RNA, 120 nt, Homo sapiens
auagcagaauugugcuuacaauaagcauguacaguauaguaauaggauuugggugacuaaauuuaccauuuugcugucauugccaaugcuuuugguugugaaaauuuauaaaauugcuau

SEQ ID NO: 396354 - RNA, 65 nt, Homo sapiens
aggaagugugcaauuaauuucuauuuaccaucccuucuucucuagaaaaauugauaucgcuuccu

SEQ ID NO: 396355 - RNA, 81 nt, Homo sapiens
auaucaguuccuuucauuucaaacauuugcuugacauuuguaguaauuaggugaaugcuggaagaaaugauuaaaugauau

SEQ ID NO: 396356 - RNA, 90 nt, Homo sapiens
augcaggcagaggaaacagaggugccacaauaucaucuguuugcaucuggauucuauauugccuugccuacuuuuccaucucaccugcgu

SEQ ID NO: 396357 - RNA, 64 nt, Homo sapiens
auugugaauggugccucaguaaacauacgugugcaugugucuuuauagaagcaugauuuauaau

SEQ ID NO: 396358 - RNA, 68 nt, Homo sapiens
aauuugccuggggucaacuuuuaauugcuggagugagcagcacuucacauuguacaaacagguaaguu

SEQ ID NO: 396359 - RNA, 108 nt, Homo sapiens
aacugcugaaaaaaauuguacucaucgcuauuguucuuacaugcugucaucugcaaaaauaggauguagcuuugagggaacaaaugaugagaccuuuucacuccaguu

SEQ ID NO: 396360 - RNA, 67 nt, Homo sapiens
gcagcagcauggguauaaaucuccaccccucagauggggacugcagauucaaaccaugacuugcugu

SEQ ID NO: 396361 - RNA, 80 nt, Homo sapiens
cagcaagaaugcuuuuaauagcuuuaaaaaaguuuucaaauuucuuuggcaaaugaagucagcuguacaguaucuugcug

SEQ ID NO: 396362 - RNA, 64 nt, Homo sapiens
ugaagugggaaaugaguauuaagcaaauaaauagacacaggcuguauacuuauuuauuauuuca

SEQ ID NO: 396363 - RNA, 126 nt, Homo sapiens
cuccuggacucaagcaauccgcccaccucagccucucaaagugcugggauuggccaggcgcaguggaucaugccuguaaucccagcacuuugggaggccgaggcgggcagaucacgaggucaggag

SEQ ID NO: 396364 - RNA, 65 nt, Homo sapiens
gucccaaguguaucagaugugggucccucauuccugcccugcagcuaugucuguugcucuugggc

SEQ ID NO: 396365 - RNA, 56 nt, Homo sapiens
cuuccugcagaagcacacagccucaggagcuuccgaacugugcauuucuguggaag

SEQ ID NO: 396366 - RNA, 100 nt, Homo sapiens
uuauuguaauuuuaaaccauuuucaguuucagaugcuuuagaaauagaccaguuguuuuugugguauauugcaacaacgggaagauuauauuaccaauaa

SEQ ID NO: 396367 - RNA, 63 nt, Homo sapiens
guacacauucugauugauugguaguggcuguccagagugcuaucauugauuagugauguguac

SEQ ID NO: 396368 - RNA, 55 nt, Homo sapiens
uugagauggagucucgcucugucacccaggcuagaguagagcggcucgaucucag

SEQ ID NO: 396369 - RNA, 95 nt, Homo sapiens
cuccaaacaaaugugaacugaucuaguuaguguucauaaauuugcauaaaguugagcauuguuuggacuuggauuauuuuguccuugcuuuggag

SEQ ID NO: 396370 - RNA, 57 nt, Homo sapiens
uuacaauuuauuccuuuuggcggaacauuugaaacauucugucagaguggauuguaa

SEQ ID NO: 396371 - RNA, 70 nt, Homo sapiens
gcaggcugagacucccaggcaugaguccauaggcaaaauuccucuuucaccagggaagucucaacucugc

SEQ ID NO: 396372 - RNA, 88 nt, Homo sapiens
ggagaaaucgcuugaacccuggagguggaggugcagugagcugaaaucgcgccauugcacuccagccugggugacagagcgagacucc

SEQ ID NO: 396373 - RNA, 78 nt, Homo sapiens
cucucaguuacuugacacaaccaauugaaucuugcucaaggcaguggaaguuggguuugugucaguugcaaccaagag

SEQ ID NO: 396374 - RNA, 59 nt, Homo sapiens
uaacauagucauauacuugcuugaguuuucacauagggcacaggaaaugacucauguua

SEQ ID NO: 396375 - RNA, 86 nt, Homo sapiens
aggacugaaaauuguacccuuugucaaucaguacuaaccaguaacuuuuugcucauugggggaaugauaaaggaauucuuaguucu

SEQ ID NO: 396376 - RNA, 76 nt, Homo sapiens
caguuuacugagaaugaugauuuccaauuucauccgugucccuacaaaggacaugaacucaucauuuuuauggcug

SEQ ID NO: 396377 - RNA, 66 nt, Homo sapiens
auagguugaguaguaaggauauuaucuuuguuggaggaaaaacagucuuuauuauuuuaggccuau

SEQ ID NO: 396378 - RNA, 55 nt, Homo sapiens
cagauagccagugguccucauggucagaggaggggugaggucauugggcuuucug

SEQ ID NO: 396379 - RNA, 82 nt, Homo sapiens
uuaaaauuaguugcauucaggauaugacgaucgaauauaauaguuuauagauuaugcguccauauucaugagcugaguuuaa

SEQ ID NO: 396380 - RNA, 60 nt, Homo sapiens
ucuucuggagcaugauggccuaaagcagaggagacaaauuagguuauuauaauuagaaga

SEQ ID NO: 396381 - RNA, 57 nt, Homo sapiens
caugguguauaugugccaaugggugcagcacaccaacauggcacauguauacauaug

SEQ ID NO: 396382 - RNA, 68 nt, Homo sapiens
uugcuugaaccuggaaggcagagguugcagugagcccacauugcaccacugcacuccagcuugggcaa

SEQ ID NO: 396383 - RNA, 106 nt, Homo sapiens
ucccacacgcggacagagaccacuagugagguccagagcaucacauguggaugccauccacaguugaaauuuugacugucauacguggaucuggccacagguggga

SEQ ID NO: 396384 - RNA, 72 nt, Homo sapiens
cuuaggaguauggcucaauucuuucccugaaauucuuauuugauuuagcaagauugagccgucuuccaugag

SEQ ID NO: 396385 - RNA, 55 nt, Homo sapiens
agcucguaugaucucauuuauguucauuucucauugugauggugcauacugagcu

SEQ ID NO: 396386 - RNA, 81 nt, Homo sapiens
guuugcucacaaguagcacaugccacccugucucuuuugcagagacagggucucacuguguugcccagacugaucucaaac

SEQ ID NO: 396387 - RNA, 63 nt, Homo sapiens
augcugggaaugacucuggaucugcuggcuauaaacagagaucacuucuguauucuacagugu

SEQ ID NO: 396388 - RNA, 91 nt, Homo sapiens
gcuauuccagacuucccucaucagaaucccuuagggauggggcauuagaaacuuauauuuuaacaagcacccuaagugauuuuuauguagc

SEQ ID NO: 396389 - RNA, 57 nt, Homo sapiens
cuacagaguaucuaaagagguaaaggcuagaagugagacuuugaaagauaccugugg

SEQ ID NO: 396390 - RNA, 57 nt, Homo sapiens
gcuaaaauauuugggcuuugaucuguaggcgauuagagccauugcagauguuugagc

SEQ ID NO: 396391 - RNA, 77 nt, Homo sapiens
ggaggcugaggugggaugaucaccugaaccugcggaagucgaggcugcaaugaacugugaucaugucacugcacucc

SEQ ID NO: 396392 - RNA, 58 nt, Homo sapiens
gaggccacagcuaucagggacauagcugaagccagugucuuugaugucuaugugcuuc

SEQ ID NO: 396393 - RNA, 64 nt, Homo sapiens
ugagaucaaggugggcccugggggccgcccccgccaugcccugcagugcucaccuugggucuca

SEQ ID NO: 396394 - RNA, 61 nt, Homo sapiens
gcucauuaguuuagugguaccuggccaauaaguagccaugauaugacaaagccuagugagu

SEQ ID NO: 396395 - RNA, 60 nt, Homo sapiens
uguuaauugaaugcagacaccagggagaagcaauuuccuggacaugugcauuaagagaca

SEQ ID NO: 396396 - RNA, 56 nt, Homo sapiens
uugaggacugcuaagcauuugaguaauuuuauaacuaaaugcugagaaguccuuaa

SEQ ID NO: 396397 - RNA, 58 nt, Homo sapiens
guuggcugugggugugggaguccuccucggagagccuggucugacagccccagucaac

SEQ ID NO: 396398 - RNA, 130 nt, Homo sapiens
ggcacggugugcgcaugugugacgagaccugggggcacgugugugcugugcucagcucuccuaauacugggagauggaacagacacugcgugcuggcugggagucgucgcuaggccaucucauccuagcc

SEQ ID NO: 396399 - RNA, 78 nt, Homo sapiens
gucucuaagcuguaagaucugcagcugucauuaaaauaucuacaguucuguagcuuuuauaugcuuagccaaacagac

SEQ ID NO: 396400 - RNA, 129 nt, Homo sapiens
uugaauagguuaugugagaggugacuggguuauuugggaggugacugguuuaucuggcagugacuggguuaucuggggugaauagguuaugugagaggugacuggguuauuugggaggugacugguuua

SEQ ID NO: 396401 - RNA, 66 nt, Homo sapiens
ggauaucucuuaguuuuugccuauaaagaaugacaaccauugaaaguaugagacugggagaaguuc

SEQ ID NO: 396402 - RNA, 75 nt, Homo sapiens
cauaguaagugguagggucaggauuggaacccagacuguuugacuccuaaacuugugcuuugaccauuuacugug

SEQ ID NO: 396403 - RNA, 59 nt, Homo sapiens
caguaaauaucugagcgaggucuggaaccagcccagucugacugccaugauauuugcug

SEQ ID NO: 396404 - RNA, 61 nt, Homo sapiens
agauuugggaggggccagagacagaaugauauggauuggcuuuguguccccacccaaaucu

SEQ ID NO: 396405 - RNA, 75 nt, Homo sapiens
ucacuugagccuaggcgguugaggcuguggugagcugugaucacgcugcugcaaccagccugggcaacagaguga

SEQ ID NO: 396406 - RNA, 99 nt, Homo sapiens
ucaaauaggaaaagauuuuagucuuuucaguuugucaggauguaauaaaaaugcaaugaauagacacuaaagacuguauuuuuuaaaucuuuuuuuuga

SEQ ID NO: 396407 - RNA, 57 nt, Homo sapiens
uaggaggccaagccaucucuggagaugacuaucucccaguguguagcuugucucuua

SEQ ID NO: 396408 - RNA, 84 nt, Homo sapiens
agaagugcuaaaugcaugaggcgaugugcuaauuaccuugauuugaucaucccguauugucuauguguauuggacuaguacucu

SEQ ID NO: 396409 - RNA, 56 nt, Homo sapiens
uuuagcagcaaagagccaugcucuguaaaauagauaguggcucucaguuugcuaag

SEQ ID NO: 396410 - RNA, 76 nt, Homo sapiens
ugagcauaagugcuucagaagacaauauuuuccaaaaaaguuucaaggugaauauuucuaauguggcaucuguuca

SEQ ID NO: 396411 - RNA, 62 nt, Homo sapiens
ggguggcuggaucucugcauugucacccucacuccugugccaggcaaaugaagcagccgcuc

SEQ ID NO: 396412 - RNA, 85 nt, Homo sapiens
guagaugaaauauagguauuuuuaaaugacuguugaagaaaaauggcucugauauggcaaauuuaaaaguaucugaauuuucuac

SEQ ID NO: 396413 - RNA, 83 nt, Homo sapiens
aguugcauggugugauggaaggagaauggucuuugaaagcagacagacauaauuucaaauaccagcuuuuccagaauguaacu

SEQ ID NO: 396414 - RNA, 60 nt, Homo sapiens
ccugaaaauauccucuccuuugcauacgggaacacacagaugggaggaugcgucuucagg

SEQ ID NO: 396415 - RNA, 105 nt, Homo sapiens
cugccugucauggagugggagcacaagaaauguuucaugaaauuugaauaaaaguaaaauuaaugaagaccaucugugccucauuuacagagaaugacauggcag

SEQ ID NO: 396416 - RNA, 57 nt, Homo sapiens
aucaugggggcaguuucuaaugguuuagcaccaucccccuaguacuguucucaugau

SEQ ID NO: 396417 - RNA, 64 nt, Homo sapiens
uucaguuugccaguauuuuauugaggauuuucacaucaauguucaucagaaauauuggccugaa

SEQ ID NO: 396418 - RNA, 84 nt, Homo sapiens
ccaaaccuaaugcuguuuuuaucauguugucuuaguagccuaucauuuuggugagauaacuaaaaacauuuugcggauguuugg

SEQ ID NO: 396419 - RNA, 72 nt, Homo sapiens
ucugacaaugaacaaucuauaguuauauccuggauaagccuagucaaacucaaagauugguuagaugucaga

SEQ ID NO: 396420 - RNA, 55 nt, Homo sapiens
ggagagguagcaaacauuuuuuucaaagcaucagcuagaguauuguuacuucucu

SEQ ID NO: 396421 - RNA, 79 nt, Homo sapiens
uugaccaaguaaagacugagaauagaucuugaagaauauggugaaaaucuucauaguucuuuuagucauuauuugucaa

SEQ ID NO: 396422 - RNA, 64 nt, Homo sapiens
aacugcuguuuggguacugguggguugcaacuauuaaaucuccccagacaagccacuuagaguu

SEQ ID NO: 396423 - RNA, 77 nt, Homo sapiens
ugcagauuuccacauggacuuaccuucgccguggcuaauuucaagugacaugagggcaugguucaggaagagaugca

SEQ ID NO: 396424 - RNA, 64 nt, Homo sapiens
uuguuguuuuguuuucugagaaugggucuuacucuggauccuagguuagagaacaaaaccauga

SEQ ID NO: 396425 - RNA, 73 nt, Homo sapiens
aaggcucaauaguagcaugcaauauuauagagaugguuuuacaucuguuuugcauaauguucuuuugguccuu

SEQ ID NO: 396426 - RNA, 72 nt, Homo sapiens
gucuuuaucagcagcaugcaaauggacuaauacagaaaacugguacugguagugggguguugcuguaaagau

SEQ ID NO: 396427 - RNA, 85 nt, Homo sapiens
aguaaaauauuaaauagaaauguugauagugggcauuguuguucucaaacucaguguuccagauugcauuauuuaauaugauacu

SEQ ID NO: 396428 - RNA, 71 nt, Homo sapiens
ggagcuugaaagugauguccaggcuuucaggcuaauugcuggaaagccccagucauuuucuaaaaaguuuc

SEQ ID NO: 396429 - RNA, 76 nt, Homo sapiens
cuuacuccaaagcuauagugaucaagacugugugcuaauggcauacagauagacauauauagcucaguggaagaag

SEQ ID NO: 396430 - RNA, 100 nt, Homo sapiens
gcagaccuccauucugaguggugagauguucagacgaacuggucagagauucugcucuagagguuauacaauauuuugaacaucacucauggguguuugu

SEQ ID NO: 396431 - RNA, 98 nt, Homo sapiens
gaggugggaggauugcuuguuccccggagguugaagcuacagugagccuugauugugucacugcacuccagccugggcaacagguaagacucugucuc

SEQ ID NO: 396432 - RNA, 126 nt, Homo sapiens
ggaagggaugaaggugauagggucuccuuggcaaagagacaugcaucggggcuuugacaaacaugaguccuccuuguuuugucucugcugauuaaugaggagaugcugccaucuuucuuuacuuuc

SEQ ID NO: 396433 - RNA, 74 nt, Homo sapiens
acagguguauucuuugucacuaaauuuuuuuaaauaaaucauuuauuugguugggugcgguggcuuacgccugu

SEQ ID NO: 396434 - RNA, 58 nt, Homo sapiens
acauucugagaaaugugucauuaggugauuuuguccuugugugaacaucacagagugu

SEQ ID NO: 396435 - RNA, 83 nt, Homo sapiens
agucuguagguaguuaauccugucuugccauccaauaauauaaaauuguaggaauguguaauaugggaacuccuaccaagacu

SEQ ID NO: 396436 - RNA, 90 nt, Homo sapiens
aaggucagauauguaguaguugaaaaagaaguaggguuaaaaauaauaauaauacccuucccucugacauuaaucauugauauugaccuu

SEQ ID NO: 396437 - RNA, 75 nt, Homo sapiens
uuuuguagcuaggcuguaauucgugaaguuucuauguucauccuagagacucauuuccauagucagcucauaaga

SEQ ID NO: 396438 - RNA, 113 nt, Homo sapiens
uucauacagggccuuguguguaguuguagcucauuaauucucagugcagugcaaauauacagcauucacuguugaugggcaugcagguggucgccaguuugggcuauuaugaa

SEQ ID NO: 396439 - RNA, 77 nt, Homo sapiens
gaaaccacugggcaguuuauuaucaguaucuugucucccugcuuaucaauuuugaucauaaucuugcucaguguuuc

SEQ ID NO: 396440 - RNA, 55 nt, Homo sapiens
gaugaguauauuguauucauuauauugguuagauggugaguauauuguauucauu

SEQ ID NO: 396441 - RNA, 83 nt, Homo sapiens
uagugguuccuuuuaguggacaaagguauuuagaaaccaagaucuagaugccaguuguguucacugcuacagggguaucacug

SEQ ID NO: 396442 - RNA, 107 nt, Homo sapiens
auaguguaguagagcuaggaggagaggguccuggagaagcguggaccgguccggguggguuccggcagguucucacccucucuaggccccauucuccucugcacugu

SEQ ID NO: 396443 - RNA, 114 nt, Homo sapiens
ucagauggugaugcuauuggcugugauuaugguuaugauucaaguuggcaaugagacucgcaagaugcaauuggcuuguguuuacuguaguuacuguuuuaguucauuuucuga

SEQ ID NO: 396444 - RNA, 81 nt, Homo sapiens
caucuauaaaauagguuuaauaguaucucauuuucuauuuaaggaguugugagaaucaaacuacauaaaucugugaagaug

SEQ ID NO: 396445 - RNA, 68 nt, Homo sapiens
ucaccucucuggcacccuugcuuaggaagaugcuacaccauccuucuaggaaggaugccaacaggugg

SEQ ID NO: 396446 - RNA, 94 nt, Homo sapiens
auuuguauugcuugaagagugaauucugguuccaaauguuuauuaaccguguguucccaugccugagucucacuuucuucauguauaugcagau

SEQ ID NO: 396447 - RNA, 60 nt, Homo sapiens
auuccauuuguuaucacacccguauaaacacccauuuugaugggugggccacaguggagu

SEQ ID NO: 396448 - RNA, 76 nt, Homo sapiens
ucacuugagcccagaaguuggaggcugcagugagcuaugaucaugucacugcacuccagcuuuggugaaagaguga

SEQ ID NO: 396449 - RNA, 80 nt, Homo sapiens
guuuacuuuuaaucugucuaugauuuugguacacaauaugaguuauggagccagauuuacaggcagauuacuuaaugaau

SEQ ID NO: 396450 - RNA, 79 nt, Homo sapiens
gaaguauuauuguacuaagugcauuuacauaaagcacuuauauguuugaagugugaugccuugaugugauaaauacuuu

SEQ ID NO: 396451 - RNA, 64 nt, Homo sapiens
uuggcagaugagccgcgcuccaagaaccagcuguugaacguuugugagugcaggcuggugccag

SEQ ID NO: 396452 - RNA, 58 nt, Homo sapiens
ucucagugacugcuggguccccacccuguucaggacuggauuucagcagacacagaga

SEQ ID NO: 396453 - RNA, 82 nt, Homo sapiens
uguaccacaugcacaucuuuuuagucucacauuugcucaacacagauggacagaaaaaaauagauguauguuuuuggguaca

SEQ ID NO: 396454 - RNA, 79 nt, Homo sapiens
uuagguuggugcguaaguaauugagguuuuugcuguuacuuuaguagcaaaaaacacaauuacuuuugcaccaaccuaa

SEQ ID NO: 396455 - RNA, 89 nt, Homo sapiens
aggcagucacaggauaauaaagcugaauccuuccugaaugucucuaaaauguucaugguucuuucuagcuuuaugguuggucacugccu

SEQ ID NO: 396456 - RNA, 78 nt, Homo sapiens
gugauguugagauguauguauauaauguguagugaucagauaagguuaauuagcauacauagcaucucaaacauuuac

SEQ ID NO: 396457 - RNA, 72 nt, Homo sapiens
ggagaccuuaggaacagccucaaauuaguaucauucuaacugugcaaccuugggcaaaucacuaacgucucc

SEQ ID NO: 396458 - RNA, 58 nt, Homo sapiens
gggacugauauuguuuuauugccugcuauguuucagggauuuuaaauaugucaguucu

SEQ ID NO: 396459 - RNA, 91 nt, Homo sapiens
auuuuuuauccuugugcuaaaaugggacuucuaaaguaaguuucucuguguuuuaaaguuaaggagcccauuuuuguuaaggaagaaagau

SEQ ID NO: 396460 - RNA, 71 nt, Homo sapiens
caggugguauuugguuauaugaguaaguucuuuaguggagauuugugagaaccggguacacccgucaccug

SEQ ID NO: 396461 - RNA, 81 nt, Homo sapiens
gagacagggucuugcucuguugcccagauuggagugcaguggcacaaucacaauucacuacaggcuugacuucccuggcuc

SEQ ID NO: 396462 - RNA, 63 nt, Homo sapiens
ugaaacauacacucugauggggaagcgaagcgcagagaugcucaucuaguguaugugaauuca

SEQ ID NO: 396463 - RNA, 71 nt, Homo sapiens
auguagcuauaguuauuuuuaauccuuuuguauuuuuacucuuacacuggaguuaaaggugauuucugcau

SEQ ID NO: 396464 - RNA, 77 nt, Homo sapiens
uauguaaccuuuugagacugaacauuuguguacacguuuuggugugaacauacauuuucauuucucuggguuauaug

SEQ ID NO: 396465 - RNA, 57 nt, Homo sapiens
cuuuugggauccaagggggucuuagucuuagaaccaguccccuguggauaccgaggg

SEQ ID NO: 396466 - RNA, 65 nt, Homo sapiens
guauuucuaguucuagaucccugaggaaucgccacacugacuuccacaggguugaacuaguuuac

SEQ ID NO: 396467 - RNA, 110 nt, Homo sapiens
uuugccaaaaccuuaagaaguuugcaaguggauuuuuccccagacaagccuccaagugggaguacagucucaacaaaagucauuugcagccuugggggaugcugagcaga

SEQ ID NO: 396468 - RNA, 75 nt, Homo sapiens
uacuguuuuguaucuggcuucuuuuaguccacauacuauaugugagauuaacuggugcuauuacauguaacagua

SEQ ID NO: 396469 - RNA, 129 nt, Homo sapiens
cugcacgucagauugaaagcccugguggaguggguucacuagggaucacuuuacccgaggguugcacagauccaugggagaagcaugguucccuggugucacucacucacucaccacuucccugagcag

SEQ ID NO: 396470 - RNA, 89 nt, Homo sapiens
uaaggcaaauuaugucauuuuugaucuuuaggauaacuaacaucuuaaagcauguaauuagguuagaaaaagacauaauuuaugcuuug

SEQ ID NO: 396471 - RNA, 77 nt, Homo sapiens
gaauaccaagugaaugaugugaaguguaaaccaaccauuguuguguuucauguuacugucauacacuuguuuccuuc

SEQ ID NO: 396472 - RNA, 73 nt, Homo sapiens
agacuggcgggaaaguugggagaagaguacaaagaauucccgaagucucuucccccagauuuccugaaugucu

SEQ ID NO: 396473 - RNA, 58 nt, Homo sapiens
ucuaaacugucuggaugcuuguggauauucauugaugucugggcauuuaacaguuaga

SEQ ID NO: 396474 - RNA, 55 nt, Homo sapiens
gcauguucaaguuaguauauuugagguugaacuaaaugugcuaauauuaauaugu

SEQ ID NO: 396475 - RNA, 119 nt, Homo sapiens
cuuagaggaaaggcuuuuauuauuuuacuauucagcgugauauacuagcugugggucugucauauauggcuuuuauuauguuguaguguguucaguuuuucagaguuuuucucauuaag

SEQ ID NO: 396476 - RNA, 97 nt, Homo sapiens
ggucuguuuugcugcccaguguauuuuugggaccugcagcugugucuuggauggaguagggcucaguaaauacuuuggaguuaaaauguauaagacc

SEQ ID NO: 396477 - RNA, 90 nt, Homo sapiens
caggggaaucacuugagcccaggagauggagguugcagugagccgauauugcuguugcacucuagccugggcaacaagaaugaaacccug

SEQ ID NO: 396478 - RNA, 76 nt, Homo sapiens
acaauugcuuuuauuuagggccagguaccacuacauugaccuguguuaauacuggcccuagagagaagucuauugu

SEQ ID NO: 396479 - RNA, 89 nt, Homo sapiens
ggagaauugcuugaacccgggagguagagguugcagugagcugagaucgcgccauugcacuccagccugaccaacaagaacgaaacucc

SEQ ID NO: 396480 - RNA, 76 nt, Homo sapiens
aggccaggucugugugguuuccagggcucaucaguaagcuaaacuggucuccuugguggccacaagacauuggcuu

SEQ ID NO: 396481 - RNA, 101 nt, Homo sapiens
ugaggcaggagaauugcuugaaacugggaggcagagguugcagugagccaggaucuagccauugcacuccagccuggccaacagagcgagacucugucuca

SEQ ID NO: 396482 - RNA, 99 nt, Homo sapiens
gaggcaggagaauugcuugaacccgggaggcagauguugcagugagccgagaucaugccacuguacuccagccugggugacaaagcgagacuccgucuc

SEQ ID NO: 396483 - RNA, 119 nt, Homo sapiens
gcuguauuucuucuccuuugacuuagaauggaagguugagaagaacuguggccuguucaaccccaggccuucucuuagcacuuuguguuacuguguugggggccaaaaaggaaucaggc

SEQ ID NO: 396484 - RNA, 60 nt, Homo sapiens
cucagaaugcgcagaguggugugugcaugcagcaacguguauacacccugugcaucuggg

SEQ ID NO: 396485 - RNA, 129 nt, Homo sapiens
caagauggcagugagugagguacgaucaugccacugcacucuaaccuaggacacagagcaaguuccugggucucacucugugguucaggcuggagugccauggugcaauuacagcucacugcagccuug

SEQ ID NO: 396486 - RNA, 80 nt, Homo sapiens
ggcuggaguauggcggugugaucuuggcucacugcaaucuccucugccuccugagcucaagugauccucccaccucagcc

SEQ ID NO: 396487 - RNA, 96 nt, Homo sapiens
aagggauaaauauguaauagcagcuugucagggcagacuguauucugauguccccacaugguucuguccccuagaagcuguuuacauuauucucuu

SEQ ID NO: 396488 - RNA, 71 nt, Homo sapiens
auuuucuuagucaaguuguauuucacuauggaaauaauugccaugugauugcauaaauugacaaggugaau

SEQ ID NO: 396489 - RNA, 61 nt, Homo sapiens
gaaucugaaucugauaccacaagcucuacccacuugccuuuggucccuucagaucggauuu

SEQ ID NO: 396490 - RNA, 69 nt, Homo sapiens
gcugguuuauuguuauuuauauccacagacacaaaaucuguacccuccagugauaacaguggacuaugc

SEQ ID NO: 396491 - RNA, 70 nt, Homo sapiens
aagucuuugcuauugugaauagugccgcgauaaacauacgugugcauaugucuuuauagcagcaugauuu

SEQ ID NO: 396492 - RNA, 67 nt, Homo sapiens
uuggagcccauccagguacagggagggccuccuuaaagcccaaaaucugacucugugaugggcccaa

SEQ ID NO: 396493 - RNA, 55 nt, Homo sapiens
gaccaucuuugagugauaaugucagugggauagaaugugucacuggauaaugguc

SEQ ID NO: 396494 - RNA, 55 nt, Homo sapiens
uuauaugcuaaacaagggguggauuauucaugccuccccuuuuuagaccauauag

SEQ ID NO: 396495 - RNA, 85 nt, Homo sapiens
uuguagccagggaccccugacucauuaggacucaagacaccuaccugguuucauagccuucuaaugaguugucgccggguugcaa

SEQ ID NO: 396496 - RNA, 55 nt, Homo sapiens
cuggaucuuguccaagaccauuaaggcaguaccacuaugagucugcaagaaccag

SEQ ID NO: 396497 - RNA, 123 nt, Homo sapiens
gaagcaugguacucagacauuuuaagggagggcauuuucugggucaucagggguuaaaggguugccagucuugacagcugaggcccagaguaccccccaccucuggacuucuaggcaggcuuu

SEQ ID NO: 396498 - RNA, 130 nt, Homo sapiens
uuuauucuugcuccuacugagaaauaaauacugacuauaguuuucuugacacaguuuagauacuacugaaaauguguuuguggagaaaauuagagcauuuguauuuagguucaugcuuuggugagaaaag

SEQ ID NO: 396499 - RNA, 102 nt, Homo sapiens
ugaggcaggagaaucgcuugaacccaggaggcagagguugcagugagccaagauccgcgucauugcaugccagccugggcaacagagugagacuccaucuca

SEQ ID NO: 396500 - RNA, 74 nt, Homo sapiens
ggguagugggaacugaggugaaaagacauggacaaauugaagagugcuuuugaaaucaguuucucacuugauuc

SEQ ID NO: 396501 - RNA, 57 nt, Homo sapiens
gggggaaucucugcaggcccucugauaacuuuuuauguggugcuugaauauuccucc

SEQ ID NO: 396502 - RNA, 69 nt, Homo sapiens
agccugcagugucuaccaucaugcacuucucaggggaacacuuugagaguggcagagguggaacuggcu

SEQ ID NO: 396503 - RNA, 91 nt, Homo sapiens
uccuucaguuuucaucuauauuuauuugcuuuucauggcaaaggaauuucuucuuggccaugaauggcaaggcagaaugaaaaauauugga

SEQ ID NO: 396504 - RNA, 67 nt, Homo sapiens
uggaauugaacuagaaccugcaaauuucaaugggaacaaaagguuaguaggauugguuuaccaucca

SEQ ID NO: 396505 - RNA, 63 nt, Homo sapiens
cugagaacugcagggagcugcauucugccaacaacgugagucagcuuagaagcugguuuucag

SEQ ID NO: 396506 - RNA, 74 nt, Homo sapiens
agcauuucauaucauuagaucuacuguauggagacaccugugcaauugaucaaauguauaugaacaaggaugcu

SEQ ID NO: 396507 - RNA, 88 nt, Homo sapiens
ggcucuccgcuuucuccaggcauaaucuugucuacauggaagaucaucccugagcaaugagcugccugcugaggggguguggugaguu

SEQ ID NO: 396508 - RNA, 57 nt, Homo sapiens
agggauccuuuugucuagucuuccucacaguaggaaaucuuagcugaggggaucucu

SEQ ID NO: 396509 - RNA, 64 nt, Homo sapiens
cuugugacagugaauaagucucuuaagaucugaugguuuuauacagggaguuucccugcacaag

SEQ ID NO: 396510 - RNA, 90 nt, Homo sapiens
ugaaaggcuuuguugguugauuggauguaggaugugaguuauggggccaucauggguuuugguccaagcaacugaauaaugaagucuuca

SEQ ID NO: 396511 - RNA, 76 nt, Homo sapiens
uuucauuuaugagcugaaccaugaaacuugcccuuaucuacuauugguuucccagugguacaguuuauauaggaaa

SEQ ID NO: 396512 - RNA, 55 nt, Homo sapiens
uugagauguagucuugcccugucacccaagguggagugcagugacacaaucucag

SEQ ID NO: 396513 - RNA, 73 nt, Homo sapiens
uuugauugguguaccugaaagugacggggcgaauggaaccaagcuagaaacacucuucaggauauuauccagg

SEQ ID NO: 396514 - RNA, 68 nt, Homo sapiens
gggccagguaucgucuuuaguagcuuauggaaaaugugccagaccaauggcugagggaugccugguuc

SEQ ID NO: 396515 - RNA, 81 nt, Homo sapiens
ggucuugcucugccaccagguuggagugcaguaaugcaaucucagcucauugcacuccagccuggaugacagagcaagacc

SEQ ID NO: 396516 - RNA, 60 nt, Homo sapiens
caggaagagauacuuuuuuucucacuuuauuuucuucugaauaaacagugucucuuucug

SEQ ID NO: 396517 - RNA, 84 nt, Homo sapiens
aaaagggaaaaguagauacagagagacaaaaauauuauuauguuacauauauguucugugucccuuucgaucuguuuccuuuuu

SEQ ID NO: 396518 - RNA, 94 nt, Homo sapiens
gaagagcaggcccuggucagaguauucuccaauugacgucaaucaguucuccacuugauugaccuggagaguacuuugacagggccugcucuuc

SEQ ID NO: 396519 - RNA, 69 nt, Homo sapiens
gaggcgggcggaucacuuugaugccaggaacuggagaccagccuggccaacauggugaaaccccgucuc

SEQ ID NO: 396520 - RNA, 89 nt, Homo sapiens
gcccucugccucuggaccccugccuuggcccuaguucauggcuccucucuguuggacugggauggccgaggcuauagcccaggcggggc

SEQ ID NO: 396521 - RNA, 55 nt, Homo sapiens
auuuguaagcuuccuuauuugugacacgaacgauauuggaggaagacuuagagau

SEQ ID NO: 396522 - RNA, 75 nt, Homo sapiens
acuggggcugcugccuuuuuuucagagaugcccuucccagagaggagggaucuagagaggcagucuggccgcagu

SEQ ID NO: 396523 - RNA, 64 nt, Homo sapiens
ccaauagcacaugucagguaauuugccaaugauucauugcagugacagguuaugguguuauugg

SEQ ID NO: 396524 - RNA, 70 nt, Homo sapiens
uggaauuaggcuagaauguuauuaaggaaaauuuuugaaugacacuuaguuguauccuaguucaauuuca

SEQ ID NO: 396525 - RNA, 106 nt, Homo sapiens
ccuggaggaaacgccccauggagauacgggcagagccugguauuuggcaccaaacacaccugagugccugauacccucugucucucacuggcugugugaccccagg

SEQ ID NO: 396526 - RNA, 57 nt, Homo sapiens
ccaggaggucgagguugcggugagcugagauggugccacugcacuucagccugcugg

SEQ ID NO: 396527 - RNA, 61 nt, Homo sapiens
auuuguaaagugcuuaaaaguaugccuugcaaaggaaaugcuauguaagcauuuauuaaau

SEQ ID NO: 396528 - RNA, 81 nt, Homo sapiens
ucuuuuucuuccguagcagcuacuaaguugcuguguugacucacaugccuaacucuagcugcuaaaucauguugagagaga

SEQ ID NO: 396529 - RNA, 89 nt, Homo sapiens
uauaacucuucuauagaaauggcucuguuggcccaagaccucggaugccaguuuucagccaggagcacauuuuugcagggaggguuaua

SEQ ID NO: 396530 - RNA, 84 nt, Homo sapiens
ggguugaaugguaauuauuuuaaguuuuuugaggaauugccacacugcuuuucacaauggcugaacuaauuuacauucccaccc

SEQ ID NO: 396531 - RNA, 55 nt, Homo sapiens
caaggauuguaacaccaagguuaguccuagggcugaacugggugcauagaccuug

SEQ ID NO: 396532 - RNA, 69 nt, Homo sapiens
gaaguauguuuaagacuucaagguagacagaaaacacuaaagacuguaugccuguuucaaacaaacuuu

SEQ ID NO: 396533 - RNA, 86 nt, Homo sapiens
uaaguucuaggguacaugugcccaaugugcagguuuguuaccuauguauacaugugccauguuggugugcugcacccuuugacuug

SEQ ID NO: 396534 - RNA, 69 nt, Homo sapiens
uacuugaaauguuuucccgaccuuggccaaaagcagguugaguuuuccauuggaaaacuuuucuaagua

SEQ ID NO: 396535 - RNA, 65 nt, Homo sapiens
gugacuugaggcucgcacaaguucuucaaacagcuugcgguggaacauggcugccucagccucac

SEQ ID NO: 396536 - RNA, 60 nt, Homo sapiens
ucgugaagaaacaguuuucugucuuuauuacaaaguuauuuuugaaguguuucuucauga

SEQ ID NO: 396537 - RNA, 66 nt, Homo sapiens
uggggcaaugaacauuuuugcaugcauaccaggaugaggcauggaaugaaguuuucuguugcccca

SEQ ID NO: 396538 - RNA, 57 nt, Homo sapiens
agaacugguuauuuaaaggcugaaaugcuuccguuuugcuugugaauagccacaucu

SEQ ID NO: 396539 - RNA, 97 nt, Homo sapiens
cuggcuuugguagguguggcaaacagugaugcaguacguagaggagaaaggcugguuucucuuuacucucauccuggagcggcacgggcccugcugg

SEQ ID NO: 396540 - RNA, 129 nt, Homo sapiens
aaugauauuucuagacacaccccuggccagaaggaaggccacugcugccagaacuuuguccagaacuuuguccuuuccuucaaggcaguggccuuccuucuggccaggggugugucuagaaauaucauu

SEQ ID NO: 396541 - RNA, 68 nt, Homo sapiens
ggguacaugugcacaaugugcagguuugauacauagguauaccugugccauguugguuugcugcaccc

SEQ ID NO: 396542 - RNA, 106 nt, Homo sapiens
aaaacucacccacgaccuucaguuacaaucaggagagcagugagcacaacugguuccacaggcaccucacaugcucaccugguguuccugggguucacagaguuuu

SEQ ID NO: 396543 - RNA, 69 nt, Homo sapiens
agcaauucucuucaggaaaaugucauacgugguagaaauucaaugcauauuuuaccuagaagagcggcu

SEQ ID NO: 396544 - RNA, 62 nt, Homo sapiens
uucuucaugcaucuuguggaauuugacugugaagcaaucuguuccaaaggauggauaaagga

SEQ ID NO: 396545 - RNA, 98 nt, Homo sapiens
aauuuuauaggaccccggaaaauugauugaggaagaucuaaaagaaaacaauggucaaauuuuguucuuuaguucacuugcuccagguccugaaaauu

SEQ ID NO: 396546 - RNA, 58 nt, Homo sapiens
ggacauguggauugaucuggcucuuugauuuugugaagagugguuuucaaauaugucu

SEQ ID NO: 396547 - RNA, 72 nt, Homo sapiens
agagucugguacuuguuuguaaggggaguguucucacauucacaaaauucuugacaggaaguugccaauucu

SEQ ID NO: 396548 - RNA, 66 nt, Homo sapiens
agagguuuaacuggcuuaugguucugcaagcuauacaagcaugccacuagcaccuguucaacuucu

SEQ ID NO: 396549 - RNA, 92 nt, Homo sapiens
gcauugguuagagauaggcugguacugagaaauuuauaacauugcuaguuaauuuauacuggcaaauucuuguaugccuacuuaauauuugc

SEQ ID NO: 396550 - RNA, 79 nt, Homo sapiens
ucugcguauagucucauagaauggggaaucacuucucccuagagaugguccccaauacuucuauagacuuugacucaga

SEQ ID NO: 396551 - RNA, 64 nt, Homo sapiens
uugcacuguaauuuauuuauguaucugucucucccacuagacuccaugaauagguugagggcag

SEQ ID NO: 396552 - RNA, 80 nt, Homo sapiens
gucauaucuauuuccccauuccuuugaaucugagcgggcugagugacuugcuuugguuaauaggauauggcagaagugac

SEQ ID NO: 396553 - RNA, 106 nt, Homo sapiens
ucuuuugccuccccucuuuaaaugaaagcacacuuggauaggauucagauauauggauuguguuugauaaguccauaguuguucuuuuuuaaacagugguuaagga

SEQ ID NO: 396554 - RNA, 59 nt, Homo sapiens
ugcuuuuucugaugagguaacauuuggauagaggucuaaaugcauugagggaaaaggca

SEQ ID NO: 396555 - RNA, 89 nt, Homo sapiens
gcaaauuaaacaguuccuaggauuuucauucuuucuuccaauagaucugggaugaagaagaauaguucguauucucguuuguaaauugu

SEQ ID NO: 396556 - RNA, 56 nt, Homo sapiens
uguggcuuuauuuagaagcagggucuuugcagauguuaagucaagaugaggucaua

SEQ ID NO: 396557 - RNA, 70 nt, Homo sapiens
uggcugugacaguuucucaggcuuccuuauuuuugaugaccuugacaguuugaggaauauuggucagcua

SEQ ID NO: 396558 - RNA, 91 nt, Homo sapiens
ggagggacauucugaucuggaggugucuggggacguuaaacaaaagaacaugccaauuucuucagagccaccucaagucacugggcccucc

SEQ ID NO: 396559 - RNA, 63 nt, Homo sapiens
gucagugucugugcaccgcuggaagcucgguuggcugacuccugggccgugcuuggaccugac

SEQ ID NO: 396560 - RNA, 84 nt, Homo sapiens
ugcaaaucccucucuccuacuuguaaagacaauuuaaaguagaugcucuuggauggucuuuauauaguaucggaauuauuugca

SEQ ID NO: 396561 - RNA, 57 nt, Homo sapiens
uauuauagcacauuguaagucucacucaagagagcugagcuaggugaggcuguaaug

SEQ ID NO: 396562 - RNA, 62 nt, Homo sapiens
ggcagaagccuagcucuguguguguaguggcaacaacagcacaguuaaaugaggcuucugcu

SEQ ID NO: 396563 - RNA, 84 nt, Homo sapiens
uugccuucuaaguacugucagaauuggacugguaccuagcaaaaauaucaaaauuaugaguccuagaacagugcuuggauguaa

SEQ ID NO: 396564 - RNA, 83 nt, Homo sapiens
gcuuaccuuaaaacagaccaugugauguuucuguaaaugguucuggucauugauaugugaguauaugguuauuuguggugagc

SEQ ID NO: 396565 - RNA, 62 nt, Homo sapiens
guaucaugcuguuuugguuacuauagcuuuguagcauaauucagaguuaggcagugugauac

SEQ ID NO: 396566 - RNA, 71 nt, Homo sapiens
gccgucagccgaacuuaggguuacucugaaauaugcucuguauauuagaacuagaggaguuugagugaggc

SEQ ID NO: 396567 - RNA, 69 nt, Homo sapiens
uugcuaaugaaguuucaggcaccauugucauugauaacaucuuaucaggagacaggguuuugagagcaa

SEQ ID NO: 396568 - RNA, 56 nt, Homo sapiens
uugagauggagcuucacucuuguugcccaagcuggagugcaauggcgccaucucgg

SEQ ID NO: 396569 - RNA, 66 nt, Homo sapiens
gcagcauucaugcaggcuacucacuccucuaucaucaugauacuggguucccuaagcgcaugcugc

SEQ ID NO: 396570 - RNA, 129 nt, Homo sapiens
uucuuuaaaauuaaauuauaugugggugauucuauuccauaaaaauggcaacggcgaguuugagaaaaaucacauucucagugcuaucuuuuaugccuucucaugcauuaauuuaacuuuuuuaaggaa

SEQ ID NO: 396571 - RNA, 64 nt, Homo sapiens
ccauggagcuugcucugucucucacauaugcauacagaagucaugugagcacagagcaagaugg

SEQ ID NO: 396572 - RNA, 70 nt, Homo sapiens
ccucacuucccuauuagcucacgucaucuuugugcaagaaggaucacaugucagccguggggaagaaagg

SEQ ID NO: 396573 - RNA, 61 nt, Homo sapiens
uggugcaguugggcaaaaaugaggaaaucuuuucuggucuggguuuugcuuaacugcgcca

SEQ ID NO: 396574 - RNA, 59 nt, Homo sapiens
ugugaauagugcugcaaaaacauacgugugcaugugucuuuauagcagcaugauuuaua

SEQ ID NO: 396575 - RNA, 79 nt, Homo sapiens
ggacaggcagcugcuuuugaugacaaaaacaauucugucccaccagauguuuaucccaucaugaagcacacguaggucc

SEQ ID NO: 396576 - RNA, 77 nt, Homo sapiens
ccagaaucaggaucuuauuuggggaaaggguccuugcugauguaguuaaggauccugagaugaagagaucauucugg

SEQ ID NO: 396577 - RNA, 94 nt, Homo sapiens
auucguuucagugguugccauagugcugccagauaucuaggcaaaugaaacuguggugugcugggaccacgcugggugagcuauugagaugggu

SEQ ID NO: 396578 - RNA, 79 nt, Homo sapiens
gaagaacacaauuuuuuaucuauguuuucgcgaaggggaccagagcguuccuuccuuuguggggcgguggguaaucuuc

SEQ ID NO: 396579 - RNA, 84 nt, Homo sapiens
ggcaccuguaugucugggugugggacucgggcucuggaauggaaugaagggugugaucaugcuccaggcgagaaccugggugcc

SEQ ID NO: 396580 - RNA, 62 nt, Homo sapiens
uaagagcuaggauuuuaaaucagccaauguugauaaaguugauuguaaaauguugguacuua

SEQ ID NO: 396581 - RNA, 55 nt, Homo sapiens
uagcagugucauuuucuggugagggcugcugucuacauaaaaaugaugcugucug

SEQ ID NO: 396582 - RNA, 69 nt, Homo sapiens
gugcuuuaacucaagagguggagguugcagugagcugaggucgugccauugcacuccagccugagcgac

SEQ ID NO: 396583 - RNA, 59 nt, Homo sapiens
uaaguccauauguuggcaugauuuagcuccugcuuaugagugagaacaugugguauuug

SEQ ID NO: 396584 - RNA, 61 nt, Homo sapiens
cauugcuuuuggugguuuagacaugaaguccuugcccaugucuauguccugaaugguaaug

SEQ ID NO: 396585 - RNA, 118 nt, Homo sapiens
uuguguuucgaguagggugugucuggaguccccgggaccaccuccuugugcaaugauuggccaagagugcucgugggacucagcaugcagucacacucauggcuacgauucaucacag

SEQ ID NO: 396586 - RNA, 130 nt, Homo sapiens
aagcaauaaucaauauuuuaauauuuugaccugagagguacauguauuuaaugggaggggagguacaaauauuugaucuggaaguauuuguaccucucagaucaaaguauuaaaauauugauuauugcuu

SEQ ID NO: 396587 - RNA, 58 nt, Homo sapiens
aggauauucuaccccuagucagaugccucuuauagcaucucugguugugaauugucuu

SEQ ID NO: 396588 - RNA, 80 nt, Homo sapiens
uucuggcagcaugguauuuaacagucuuucuauuuaaaauguacuuagaaauguaugaguacuucaggcuuuaaccagaa

SEQ ID NO: 396589 - RNA, 85 nt, Homo sapiens
uggauuguuuugagacacaggccuggggugcccuccaugggcucauagcccagaguugccucagguuucugcucccugcguucca

SEQ ID NO: 396590 - RNA, 70 nt, Homo sapiens
ggauucaguuugccaguauuuuauugaggauuuucucauugauguucaucagagauauuggccugaauuu

SEQ ID NO: 396591 - RNA, 77 nt, Homo sapiens
ggguugaaugagagcccauaccaugguucaaugcauagcuucaauuccugccaacauggcgcuccauucuuaggccc

SEQ ID NO: 396592 - RNA, 70 nt, Homo sapiens
cacuucccuaggagaaguaauuauuugguacaaauuacauuuuuacuuaguagcuuauccugugggagug

SEQ ID NO: 396593 - RNA, 86 nt, Homo sapiens
agccaaacagaggaguuggauccagagucuucuguugaaaacuggaagcuagaaugucagcuggauucagcucccucuacguggcu

SEQ ID NO: 396594 - RNA, 105 nt, Homo sapiens
auguuaaggacccauuguuuggguccuuauugauaccaauggccauaauaaucucuaaauuuauuuauucauuaacagggaccaaagucaauagggccuuaauau

SEQ ID NO: 396595 - RNA, 56 nt, Homo sapiens
uuggaaacgucaccuuuuccuuuagaugcuaauaugcauaaggggauguccuccaa

SEQ ID NO: 396596 - RNA, 100 nt, Homo sapiens
aagaagaauuuagcuuuguaaugacaagaacuuuccauaguaauuccucuaaauguuuaggaccuuauuagggugguuuauguucugugauauucuuuuu

SEQ ID NO: 396597 - RNA, 68 nt, Homo sapiens
cuugaacccggaggcgggggaugcagugagccgagauugugccauugcacuccagccugggugacaag

SEQ ID NO: 396598 - RNA, 58 nt, Homo sapiens
gggaauauaaaaagccccagaaugaugccugugugauuugggggcaauuuaugaaccc

SEQ ID NO: 396599 - RNA, 99 nt, Homo sapiens
gauccuggccaaagugucaauugugacaaggcugagaaaccuugucuuauucuacuuucaccaguuuugucacgaauguucuuuuuugguuccaggauc

SEQ ID NO: 396600 - RNA, 90 nt, Homo sapiens
uaucauauucuauauugucuacauuuagccacagguguuaacaaaaugauaagcaccuggaaaguagacaaucuaaaaauuguaauggua

SEQ ID NO: 396601 - RNA, 62 nt, Homo sapiens
uugagacggagucucgcucugucgcccaggcuggagugcaguggcgcgaucuccugucucag

SEQ ID NO: 396602 - RNA, 75 nt, Homo sapiens
cgcuccuggaugacagcaucugugaaguugugcacuaugucacaggcccugcagaagcgucgcccauugggagug

SEQ ID NO: 396603 - RNA, 58 nt, Homo sapiens
aacuucugccuggacauccaggcauuuccauacauccucugagaucuaggcagagguu

SEQ ID NO: 396604 - RNA, 127 nt, Homo sapiens
gcuauuaacuuuucauuccuuugucaacugcaagaaucguaguauuugacaaguuggguuuuucuugucaaauauuaccauucuugcaguugacaaaggaaugaaaguuuuuuuuuuuuucaguagc

SEQ ID NO: 396605 - RNA, 59 nt, Homo sapiens
guagaaagcauuucagauuugcccccacccaagggacaaagaagcuggagugcuucuac

SEQ ID NO: 396606 - RNA, 67 nt, Homo sapiens
ucuauggguggugagcaguaaagccauuagguguuggugacccuuggcacugcucacccuccuugga

SEQ ID NO: 396607 - RNA, 62 nt, Homo sapiens
caguugcacuagccccguuucagguacucaacucagcagccacacguggcuaaguggaacug

SEQ ID NO: 396608 - RNA, 73 nt, Homo sapiens
ucuagugccauacugaauuuuggcuacaaaacucacaauuagucagcuauuggcaagauuuguauugccugga

SEQ ID NO: 396609 - RNA, 65 nt, Homo sapiens
ugucuugucucaguuacggcaauuccaggcacgugcccuggauugccugggcaugagauuuggca

SEQ ID NO: 396610 - RNA, 72 nt, Homo sapiens
gcagucccaaucuguggcaaagucuugugaauauccuuaaugugauaaaacuuugccuuagacggaguuugc

SEQ ID NO: 396611 - RNA, 71 nt, Homo sapiens
cccagguggggucaguggcgggggagaggguugcagugaggcgaaaucaugccacugcacuccaaccuggg

SEQ ID NO: 396612 - RNA, 57 nt, Homo sapiens
uagucaaaaaucacuagcuaugaagaguggcugucaaaugcagugauauuugaacua

SEQ ID NO: 396613 - RNA, 63 nt, Homo sapiens
cugaagaacaccugcugcccaguggcagguguucccagaccacugggcagcagguguucccag

SEQ ID NO: 396614 - RNA, 64 nt, Homo sapiens
ggcaacuccauuuccagagcagccccucugagccagggggcuauuccaggagaugcgaggugcu

SEQ ID NO: 396615 - RNA, 62 nt, Homo sapiens
uuagcugcugcuaggcuaaggaugagugaaaucuacaagcacaaccccuggcaugcaguugg

SEQ ID NO: 396616 - RNA, 57 nt, Homo sapiens
uucucuguggauugggugagaggcaggagaucagccucagagaaccuaagcggagga

SEQ ID NO: 396617 - RNA, 76 nt, Homo sapiens
ucacuugaacccaggagguggagguugcagugagcugagaucaccgcguugcacuccagccuggguaacaaaguga

SEQ ID NO: 396618 - RNA, 75 nt, Homo sapiens
gauguaggauaacagcauuauugcauacguuaauuauucauugaacuacuuaugucuaugaugcugacauacauc

SEQ ID NO: 396619 - RNA, 86 nt, Homo sapiens
guguacaaggcucuaacauugcuggacuaccugcucaagacgggcuccgagcggguggcccaccagugccgcgagaaccucuacac

SEQ ID NO: 396620 - RNA, 55 nt, Homo sapiens
gugggcaaagcuaguguguagaguaugucauuugugugcacacaugcaugcccgc

SEQ ID NO: 396621 - RNA, 113 nt, Homo sapiens
aaguccaugcucuuugccucaguugaaggagccagaauaugcaucccaacuauaggcaaggccacugagaugcauauucuggcuccuucaacugaggcaauaagcauggacuu

SEQ ID NO: 396622 - RNA, 80 nt, Homo sapiens
ugaagaucagauaguuguagguguguggccuuauuucuggguucucaauucuguuccauucaucuaugugucuguuuuua

SEQ ID NO: 396623 - RNA, 101 nt, Homo sapiens
ucuauuucuucccuuuuaauccuuaucuuucuuauucuguuuugccugugguacuggcuaggacuuccaguacacuguugaacagaagugaugauaguaga

SEQ ID NO: 396624 - RNA, 88 nt, Homo sapiens
aauaucaggagguggggcucacuggggccaucuugaagguaguagccagcuuucaagauggcaccagugagugccaccucuugauauu

SEQ ID NO: 396625 - RNA, 65 nt, Homo sapiens
caguggggucuguccucuucugggugcucgucagucacuuagaugaagucacagaacccaugcug

SEQ ID NO: 396626 - RNA, 61 nt, Homo sapiens
ucuagccauuaaucuugcauccaucucaaauccaguaugagaugcaagauuagauggggga

SEQ ID NO: 396627 - RNA, 59 nt, Homo sapiens
cuucacggugccuacuugugucuaugcuugucucugcuuaaaacacaagcaccuugagg

SEQ ID NO: 396628 - RNA, 61 nt, Homo sapiens
guauguuucugcccaucucuggaaaaacccagguaggcacuggugggaagagagaacaugc

SEQ ID NO: 396629 - RNA, 57 nt, Homo sapiens
cuauggcuguagucccuguguaagaugaugguggcuuggacagggugucagccaugg

SEQ ID NO: 396630 - RNA, 73 nt, Homo sapiens
ggauucgguuugccaguguuucauugagaauuuucacaucgauguucaucagggauauuggccugaaauuucc

SEQ ID NO: 396631 - RNA, 92 nt, Homo sapiens
aagaucaaaguauugacaaguuugauuuauuccaaggccuuucuacuuggcuuuuagugauggcagccuuaucacuaucuucaccugaucuu

SEQ ID NO: 396632 - RNA, 57 nt, Homo sapiens
ggagacugugccaucaagaggcucugucacgagaugccaagaugagcacgcgucucc

SEQ ID NO: 396633 - RNA, 60 nt, Homo sapiens
ggucuagagagagggguggacuguauccucuagaccagcaguccccaaccuuuuuggacc

SEQ ID NO: 396634 - RNA, 56 nt, Homo sapiens
auauagacacugaaaucccugccaacccaguuugcaugacaauuucaggucugugu

SEQ ID NO: 396635 - RNA, 63 nt, Homo sapiens
gugaaccccucauuaagcuguuuuuaaagcacgaauuuaagagccgcaagggugaagggucac

SEQ ID NO: 396636 - RNA, 63 nt, Homo sapiens
ugauuuaaaguguaugggcagaugugcauaaguuauaugcaaauacuaugccacuuuauauca

SEQ ID NO: 396637 - RNA, 64 nt, Homo sapiens
gcccaguaagaggggaaagaacugagaaagggaugaaugacucuuaaucuucuguuacuguggc

SEQ ID NO: 396638 - RNA, 64 nt, Homo sapiens
auugugaauagugcugcaauaaacauaugugugcaugugucuuuauagcagcaugauuuguaau

SEQ ID NO: 396639 - RNA, 67 nt, Homo sapiens
gcuauuuugaauagugcugcaauaaacauacaugugcaugugucuuuauagcagcaugauuuauagu

SEQ ID NO: 396640 - RNA, 63 nt, Homo sapiens
ggucauaaagacacuuggcaugauuucagucuucucaaauuuguuaaggcuuguuuugagacc

SEQ ID NO: 396641 - RNA, 110 nt, Homo sapiens
cuucauucuccagcaaugaagaggaaacauggccauucagacuguggaggaacuggaugaggagacaucuggaaguacagucuggaggccuguguuggggagagauggag

SEQ ID NO: 396642 - RNA, 78 nt, Homo sapiens
ugucaugcccaguuacuucagucacauuguguucauuacagacacaaccuaauccuaugugacugauguaaucagaca

SEQ ID NO: 396643 - RNA, 56 nt, Homo sapiens
ugcauaggagcagggucuauguccaucuuguucagguauaggccuagcuccuagca

SEQ ID NO: 396644 - RNA, 88 nt, Homo sapiens
accauaugucacuuuacacuguacuuuaucgugugaguuuuguguuuucacacugaauuugaagcaauguaaggccgacaccuauggu

SEQ ID NO: 396645 - RNA, 61 nt, Homo sapiens
ucauccugacaucucgugaagaguauguugaaaucaaugacacugcagagaugucccauga

SEQ ID NO: 396646 - RNA, 98 nt, Homo sapiens
guggcagcuuggagacuguaggugggaggaaaaggaauugccaguucaguaaacuuugucaaugcauuauucucccacuucagacuuccgagggccac

SEQ ID NO: 396647 - RNA, 62 nt, Homo sapiens
auuaacuuacugggugucucagguagcaaaauggaaacaauacuggccccaaaguagguagu

SEQ ID NO: 396648 - RNA, 66 nt, Homo sapiens
ugucauugguucuguuuauaugcuggauuacauuuauugauuugcauauguugaaccagccuugca

SEQ ID NO: 396649 - RNA, 59 nt, Homo sapiens
ugguccaucccuuuagggaauaugccuaaccuuuagguaauuuucccagagggaaacua

SEQ ID NO: 396650 - RNA, 57 nt, Homo sapiens
ugagacggagucucgcucugucaccacgcugcagugcgauggugcgaucuccgcuca

SEQ ID NO: 396651 - RNA, 59 nt, Homo sapiens
uauuagguuggugcaaaaguaauggcaaaaacugcaauuacuuuugcaccaaccuaaua

SEQ ID NO: 396652 - RNA, 70 nt, Homo sapiens
ccuguaaucucagcuccucaugaggcugaggcaggagaaucacuugaaccuaggagcuagagguugcagg

SEQ ID NO: 396653 - RNA, 66 nt, Homo sapiens
ugcccuucuuugucuuuuuugaucuuuguugguuuaaagucuguuuugucagagacuaggauggca

SEQ ID NO: 396654 - RNA, 64 nt, Homo sapiens
cucauccagucaagcuuuuagaugacugcaagccacaaccagcaucugauugcaacugcaugag

SEQ ID NO: 396655 - RNA, 57 nt, Homo sapiens
auggcacuguguauuuuucuguuggguaucaguuuccaguaaaauacacaaugucau

SEQ ID NO: 396656 - RNA, 81 nt, Homo sapiens
ggguaauggggaauugacaguguccucauucccaacacucaagggugaugggggauugacacuguccuccccagcaagccu

SEQ ID NO: 396657 - RNA, 99 nt, Homo sapiens
uuccuauaaggauccuaucacaguugcauauuuaaggacuacgaaaugaacguauuuuaaggcaugaacugugacuaaaugauggggcagggauaggag

SEQ ID NO: 396658 - RNA, 77 nt, Homo sapiens
gguucuugguaauaggcuauugcuguaguuuauugguccaucuuauagguuauuagagcaaagcuugugucagaacu

SEQ ID NO: 396659 - RNA, 63 nt, Homo sapiens
acaaggacagcagggaguugugccgauggcugaaucauuguacugccccccuguugcuagugu

SEQ ID NO: 396660 - RNA, 68 nt, Homo sapiens
gggcauucacugugcuuggccaaauuguuuaauucuuaaaacaauauucuggccaggcaugguggcuc

SEQ ID NO: 396661 - RNA, 58 nt, Homo sapiens
gugcacaagguacagguuuguuacauagguauacaugugacauguugguuugcugcac

SEQ ID NO: 396662 - RNA, 94 nt, Homo sapiens
uggccaugcugauugauacucaguguuaaggccaccucuguccaacagacagagguggcuucuacucuguuucagccaaauacucacauggcua

SEQ ID NO: 396663 - RNA, 103 nt, Homo sapiens
uauaucuccauaaguugaacugaaaaauaccucuguaaguaaagauucaacccaaggguuaguuuuuacugcgaguuauaaacuucaagaaacuggguaugua

SEQ ID NO: 396664 - RNA, 122 nt, Homo sapiens
uuagauucuaagauucuaagaaucucugcgucuagagguucuaagauucucagagucuggaauucagugcuucugaagucuggaauucucugguuguaagauucuaggauuguaggcacuaa

SEQ ID NO: 396665 - RNA, 106 nt, Homo sapiens
aggcuggggaugggcuuuuaagguauauuugguagcuauuuugcaguuuuauguuaaaugaaacuaugggauagguauuaaaaauagcaagagcaaugcccugccu

SEQ ID NO: 396666 - RNA, 97 nt, Homo sapiens
augacacuaaguucuaggguacaugugcacaacaugcagguuuguuacguauguauacuugugccauguugguauguugcacccauuaacucgucau

SEQ ID NO: 396667 - RNA, 59 nt, Homo sapiens
ucuagccagcaauuuguggugcucuaacaugcaauauauauaacaaauugccagcuagg

SEQ ID NO: 396668 - RNA, 60 nt, Homo sapiens
ugacuguucaaggagaggacaacacaaacuuugcauuuguccuccacauuugaucaguca

SEQ ID NO: 396669 - RNA, 123 nt, Homo sapiens
guauauauacuguauauaaaauaacaguacauauuuugcacauauuugggcaaaagcuagggacaugacuagcuuuugcccaaauaugggcaaaauauguacuuuuaaaguacagucauauac

SEQ ID NO: 396670 - RNA, 79 nt, Homo sapiens
cagacuggggagagaaaucaaaaccugaacaccaauauggcagugaguuuacugguuuuauauauuucucccaaaucug

SEQ ID NO: 396671 - RNA, 64 nt, Homo sapiens
guauggcaugcaugagaauuucccccuuucuaaggcugaguaauauucuagugcauguacauac

SEQ ID NO: 396672 - RNA, 67 nt, Homo sapiens
uugaggaggcagucuguccauucucagagcucaaaugcugugcugggagaaccacugcucucuucag

SEQ ID NO: 396673 - RNA, 130 nt, Homo sapiens
cacacuguuuuuugagguagguaguauuaucaucucccuuuuauagucaggaacuugaggaaaagaggguuuaaguuguucaaguugacauagaaagugauagugcugggauucaaacccaggcagugug

SEQ ID NO: 396674 - RNA, 62 nt, Homo sapiens
gcaucuccaggauuuucacacucagagaugaccacucuuaugaguagaacuccuggagaugu

SEQ ID NO: 396675 - RNA, 69 nt, Homo sapiens
ggggucagucagguaccugaaagcagccacagucucaacauuggcuguuugcagugccugaaggaccuc

SEQ ID NO: 396676 - RNA, 55 nt, Homo sapiens
gcugggaggcuguuggggugaucuaagcaagagauuauaacaguuuggacccagu

SEQ ID NO: 396677 - RNA, 95 nt, Homo sapiens
uucuucugcuuagcuaacucugcauuaaacucuuucucuacugcaguaccauggucucagugaauugguuuugucugugcagcagguagaaagag

SEQ ID NO: 396678 - RNA, 83 nt, Homo sapiens
uucucuggccauagcuggcuagaauagggauagaccuugaccuaagucaagccuaucaaauucugccuccuaugaguuuagaa

SEQ ID NO: 396679 - RNA, 60 nt, Homo sapiens
gccaaucaggaggcuguacaucagggcgggggcgggaggagcugcagcuuugugauuggc

SEQ ID NO: 396680 - RNA, 65 nt, Homo sapiens
gcagcccugauacauucuucugccuguaaggaggauuccacaggccagugccaucaggguuuugc

SEQ ID NO: 396681 - RNA, 59 nt, Homo sapiens
aaagugcugagaguucuaacuucauuggcuacguaguggcaaaagcucuacagcauuuu

SEQ ID NO: 396682 - RNA, 95 nt, Homo sapiens
acauuggcgucaccuggaaacaucuuaggaaugcagagucuugcccccagccccaccgaaucugcauuuuagcaggguguccaggugcuuagugu

SEQ ID NO: 396683 - RNA, 80 nt, Homo sapiens
cugccagacuggguugaucucagcccuaagguaacuaugaagcucccuuagguuaugauaaauuuaguuauuauuggcag

SEQ ID NO: 396684 - RNA, 74 nt, Homo sapiens
cuggagcaugcuuccauaguauuuuuacaaaauccaaaagacuuuuguccaauagaauuauggacauguaccag

SEQ ID NO: 396685 - RNA, 60 nt, Homo sapiens
auuuuacaaagugggaaacgaagguuccucuuaggaaccuaguugucaccuuuguauaau

SEQ ID NO: 396686 - RNA, 77 nt, Homo sapiens
gugggagaagugcuuguacaaaccccgaggauaauagaugugauccugccuuguaaauuguaaagcacuguguccac

SEQ ID NO: 396687 - RNA, 58 nt, Homo sapiens
uauuuucuuuaaagguuaaaucauaguuauugcuaugauaaguuauuagaagaagaug

SEQ ID NO: 396688 - RNA, 80 nt, Homo sapiens
caucucugaggauauuucuggaggacauugacaugugagucaguggacuaaauggggaauaucuacccucaauguagaug

SEQ ID NO: 396689 - RNA, 73 nt, Homo sapiens
ugacaaguaaacagucagcaccguaaguggagccuaauuagugcucaugaaaggucugcugcuauugcuguca

SEQ ID NO: 396690 - RNA, 61 nt, Homo sapiens
guagguaaguacuucuggugagaaggcaaaaacuuuuaaaaugccuauaaguaaugccuac

SEQ ID NO: 396691 - RNA, 99 nt, Homo sapiens
uuauccauugacuaguaagccuagaaagggguugcuaagugcguauauaauuauccauugacuagcgauccccuuucuaggaacccaugucaaagauaa

SEQ ID NO: 396692 - RNA, 72 nt, Homo sapiens
gggaagugaacagaccuauuucaaucauuuaguagugacaaagcugagugugaaaucuagguuucuuguccc

SEQ ID NO: 396693 - RNA, 58 nt, Homo sapiens
gcuaugaucacuacagcagggaugagcguguacacaucuucaaagaaguggucauagu

SEQ ID NO: 396694 - RNA, 63 nt, Homo sapiens
auggcuagauuguaugguaguucuacuuuuaguuuuuaaagaaaccuccauacuguuuuccau

SEQ ID NO: 396695 - RNA, 60 nt, Homo sapiens
ggcaucuuccuggauuugucaaguaaggcuugagcucugacagaccuucuggaagaaguc

SEQ ID NO: 396696 - RNA, 129 nt, Homo sapiens
uuucuaucccucagucccucaugagcccaguagaauaaauugaugagccauuugacuaaaaauuggugaucagucuauggcugugagaucgacuuauuuuuuaaaugggguuaaacuugcugauagaga

SEQ ID NO: 396697 - RNA, 59 nt, Homo sapiens
aagucaaggagagaggcgucagaagaaaugaaaucugcugacaccuugauuuuagacuu

SEQ ID NO: 396698 - RNA, 57 nt, Homo sapiens
uggacuguaauagagaacagaaagaugagucagaucagucuguggcuacugcagcca

SEQ ID NO: 396699 - RNA, 57 nt, Homo sapiens
guuugccuuuuagauaggaaugcugaaaauaaugagacacuucugucuggaggaaac

SEQ ID NO: 396700 - RNA, 79 nt, Homo sapiens
gccauaguuuacugagaaugaugauuuccaguuucauccaugucccuacaaaggacaugaacucaucauuuuuuauggc

SEQ ID NO: 396701 - RNA, 74 nt, Homo sapiens
uuacucugacuugggguaggaauauggaaugagauacuguagucuacauauuccacuaccguagcccagggugg

SEQ ID NO: 396702 - RNA, 89 nt, Homo sapiens
ccuccugggguggucucugguucugcagugcacccugcccuauugugguggccucaggggugagaaaucaagacccacccagugcgagg

SEQ ID NO: 396703 - RNA, 56 nt, Homo sapiens
gucaguuuacaugagcguguugaguuugggaaaauucaucaagcuguagacaugau

SEQ ID NO: 396704 - RNA, 102 nt, Homo sapiens
ggaggauaggaggaucauuugagcccaggagguugaagcugcagugagccaugaucgugucauugcacuccagccuggacaacagagugagauccugucucc

SEQ ID NO: 396705 - RNA, 85 nt, Homo sapiens
uggugaugaugaaugaucuuuuacauguaaauuuacauucuguuuaguaauauuuuguugaggauuuuuacaucaauauucauca

SEQ ID NO: 396706 - RNA, 63 nt, Homo sapiens
gccaucugaaaagcacacaugaguuuugcuauauuuuggacucucauauugcuuuuccauggu

SEQ ID NO: 396707 - RNA, 77 nt, Homo sapiens
ucuccucugaacuccagacccauaagccccaguugucuacucagcaucucccuuaugggucuggagaucagaggaga

SEQ ID NO: 396708 - RNA, 88 nt, Homo sapiens
uuagguuggugcaaaaguaauugcgguuuuagucauuaaacguauuaaaaguaauggcaagaucacaauuacuuuugcaccaaccuaa

SEQ ID NO: 396709 - RNA, 94 nt, Homo sapiens
uuaauuugucugcaugauuggugagcagagggagaaguaaauuugucgcgaaagcuucauucuucuguuuuaacaacucacaaagagaaauuaa

SEQ ID NO: 396710 - RNA, 81 nt, Homo sapiens
ugcuugagaagaaaaaugcaugaggugggaagaaaagaugaacacgaaacaaucuucuauuuuuccauuucuguguaagca

SEQ ID NO: 396711 - RNA, 77 nt, Homo sapiens
aggugcauuuguguuucugcaggauucuguggccaaauacugcugguugagaacuggcgugaacugcacgugcacuu

SEQ ID NO: 396712 - RNA, 57 nt, Homo sapiens
cuuggucuagugguagcgccagugccugggaaggcacccguuacuuagcagaccagg

SEQ ID NO: 396713 - RNA, 101 nt, Homo sapiens
gaagaaaggauauuggauugggaguugauucuaggucuggauuauccauaaacuuauuaugggucuuaaaucacuuagugcuucugaaccuuccuuucuuc

SEQ ID NO: 396714 - RNA, 61 nt, Homo sapiens
aggagauaagagaaugaguugucuguuucuuauuuuucauagcugguuucuucuuacuccu

SEQ ID NO: 396715 - RNA, 58 nt, Homo sapiens
aaaaaagacuuagauuuuucagaggaaaaccccagucugaagugugaaagucuuuuuu

SEQ ID NO: 396716 - RNA, 79 nt, Homo sapiens
uaguuaguuuuucugagauggagucuuuuucugucacccaggcucuggagugcaguggcgccaucucagcucauagcua

SEQ ID NO: 396717 - RNA, 105 nt, Homo sapiens
uugaccacuguugugauaaaguuggaaauuggaaacauuuaugguaacaguaugcucaugagggcuuuuuuguucuuaauguuuucacuuuuaaucagugcucaa

SEQ ID NO: 396718 - RNA, 69 nt, Homo sapiens
uaauacucuucucauuuuacaguugagaaaaccaagcucaaaaaaugguaauaaugagugguaguauua

SEQ ID NO: 396719 - RNA, 78 nt, Homo sapiens
ccuucagcucaauggcccagggucuacagccucaagaccuccuugaugcuacuaccugggcugaaagcugauucaagg

SEQ ID NO: 396720 - RNA, 58 nt, Homo sapiens
guaacauccagauauguaacauuuguaacauccagauauguaacaaucuggauguugc

SEQ ID NO: 396721 - RNA, 75 nt, Homo sapiens
gggauugggaacaugagaaugugaaugagacuuggaaaaacaagccacucuuuauuuuucauuuuuuugaauccu

SEQ ID NO: 396722 - RNA, 79 nt, Homo sapiens
auugcaaugcauugcaaaucucuuguguuugguugcaaacuuucaacugaaacacugagugaauuguugccucugcaau

SEQ ID NO: 396723 - RNA, 63 nt, Homo sapiens
caguacccucaggcuuacuaggguggggaaaaaucccacccuggagaauuugaggucagacug

SEQ ID NO: 396724 - RNA, 56 nt, Homo sapiens
uaacacagagcuccuaaucccuuggaauuuuccaguugauaggagcauuuuuguua

SEQ ID NO: 396725 - RNA, 113 nt, Homo sapiens
cuucagaaccaaggacauguaaaauugaaucaaguaaucugaguaagagucacugaguugacugagacuagauacugugagcaacaaaacuuauacucuuuccagaucugaag

SEQ ID NO: 396726 - RNA, 87 nt, Homo sapiens
aacuccuuuguagucacagugaccuugucugacuuugcaaauucuggggucauuuuaugaucacuguggauugacuacaggugaguu

SEQ ID NO: 396727 - RNA, 95 nt, Homo sapiens
gaaggaauacucauggcaguggugauaaccgcuaucauagcuaccauaaaauuacucguugugacugguugucccgcuuuccucagguuuucuuc

SEQ ID NO: 396728 - RNA, 85 nt, Homo sapiens
ugcuuguagagauauaauuuuguuuugugguguaauucaggcugcauuccaguagauggcacuuaagagcaagagccuacaggua

SEQ ID NO: 396729 - RNA, 87 nt, Homo sapiens
gaggcugcagugagcuaugauggcaccauugcacugcagcuccccagauuggagugcaguggugccaucauaacucacugcagccuc

SEQ ID NO: 396730 - RNA, 129 nt, Homo sapiens
gcccaugaucugggcccgcccccaucgugcccauguccagcgcguggcugccauugugccuguguccagcacauggccccaucgugccgauguccagcacauggcccucaucgugcccaugaucugggc

SEQ ID NO: 396731 - RNA, 55 nt, Homo sapiens
agggcagauuguauauucuccacugguuggcacauuagaguauugaauuugcccu

SEQ ID NO: 396732 - RNA, 111 nt, Homo sapiens
accuaggacuuugggacaauaaaagauaaagaugaguuuuagcaaauuuugcugaaucuugcacaauggaauuuaucuuugugaacucuuuuaaaaauucaacuucuaggu

SEQ ID NO: 396733 - RNA, 61 nt, Homo sapiens
gcugucagcaucaauuuucuuaagguguguauccucauggugucaagaugacugcugcggc

SEQ ID NO: 396734 - RNA, 56 nt, Homo sapiens
uugguccauauuugguugaauccauggguauggauaucacagauauuaugggccaa

SEQ ID NO: 396735 - RNA, 67 nt, Homo sapiens
ucuuuuguuccaucugcauccaggcagaauugauaauuguucugugcauggcagaggaaugaggaga

SEQ ID NO: 396736 - RNA, 79 nt, Homo sapiens
gccuuccauucacugugugacccugggccagacacuuccccucucugagccucaguuuccacggcuguaagaugagggu

SEQ ID NO: 396737 - RNA, 59 nt, Homo sapiens
uuggcaaacacuacaaaccagaauuuuuuucagauagcugguuguuacaugcuugccag

SEQ ID NO: 396738 - RNA, 130 nt, Homo sapiens
agucuccaugacugugagccaauuaauuucuguuuauauuaguccauucucaugcugcuaugaagaaauucuugagacugguuaauugauaaagaaaacagguuuaauugacucacaguuccauaugacu

SEQ ID NO: 396739 - RNA, 120 nt, Homo sapiens
uauuuuagagacagggucucacucuguugccuaggcuggauugcaguggugcuaucauagcucacugcagccuccagcuccugggcucaagugauccucccaccuuggccuccuaaagug

SEQ ID NO: 396740 - RNA, 75 nt, Homo sapiens
cuucaaacuccuugucugagaugacugcaagagcaucagccauuguauccaucuuucaggcaacaggauuugagg

SEQ ID NO: 396741 - RNA, 57 nt, Homo sapiens
uuugaggaccagugcuaguuugcucaccgcauuuugaguagcacugugucuuacaaa

SEQ ID NO: 396742 - RNA, 116 nt, Homo sapiens
gaacccgcgugucuuugacuucacauuucaaauguucuuucaccacccaugcagaaagaugagacagggugugugguaggacguuuucuagauuuggaaacagaggacucugguuc

SEQ ID NO: 396743 - RNA, 97 nt, Homo sapiens
uuaucuuaacacucugagguaaguauguuauuacuuuuuauagaugaggaaaccaaaguuaagagguuacauaacuugccugagauugcaaagauag

SEQ ID NO: 396744 - RNA, 86 nt, Homo sapiens
ggcauugacuugggcuugagggugcccagucacaccuguuuugugacaugggcuggcagguccaguuaaggggagauugaagugcc

SEQ ID NO: 396745 - RNA, 85 nt, Homo sapiens
gcuaacugguuauuuugcaugccaguugauggaguuucuucauaguguugauggccuuuacaauuugguauguuuuuucaguggc

SEQ ID NO: 396746 - RNA, 63 nt, Homo sapiens
gggacugugacaggagauuaugugauguucaugagaugaucauacugucucuguccagguccc

SEQ ID NO: 396747 - RNA, 93 nt, Homo sapiens
agaaaaacaggccaaagagagucagucugagcaccaggauuuaaaccuagagagccugacucaagagccugacucaucuuucaccaguuuucu

SEQ ID NO: 396748 - RNA, 67 nt, Homo sapiens
cuggagaauguuccacauacauuuaagaagacuucauuuuuuuagugcugaguggaauguucuauag

SEQ ID NO: 396749 - RNA, 72 nt, Homo sapiens
cauugcauugugaucuucccagauuuagggcagagacagggcagucagucugggaaggcacuuaguggagug

SEQ ID NO: 396750 - RNA, 63 nt, Homo sapiens
uguuguuuaagacacccauucuauggcauauuguuaugacagauggaguugacuaagacaaca

SEQ ID NO: 396751 - RNA, 66 nt, Homo sapiens
gugucagaaucucagaugacaacgucaggugcgagcaccuaauguugucgucucagauucugacac

SEQ ID NO: 396752 - RNA, 91 nt, Homo sapiens
uaagccaauauuuccgauauggauguuaagguucacagcacaacaaacaucacaaccuguggcugucuuuuaccucauucauggaggcuua

SEQ ID NO: 396753 - RNA, 71 nt, Homo sapiens
gccucugcucgugagaugagggaagccuaggcaguacaggcucccuggcuucuuuaaucuagaggaggggu

SEQ ID NO: 396754 - RNA, 81 nt, Homo sapiens
ccuggccccucugagcuacaccucuggaccugaauauccucaggguguauaggacuugguguaguuucuuauucagccagg

SEQ ID NO: 396755 - RNA, 62 nt, Homo sapiens
gugggaggagaguuuacugcauuuuuaaaagcauuuuugaagagucuaaaucugucuuccac

SEQ ID NO: 396756 - RNA, 57 nt, Homo sapiens
augucauagaagccugugaacccagcuuuaguuaugcacuggaauuuucugugacau

SEQ ID NO: 396757 - RNA, 66 nt, Homo sapiens
gugucaaggaugccugucaggcacuuguaccaacaauguuuugaagccaugacaucauuuugacac

SEQ ID NO: 396758 - RNA, 66 nt, Homo sapiens
gcugcguuuccauagugcaguaguuccugaaguucuugaccugaccugcagcacugggaaugcagu

SEQ ID NO: 396759 - RNA, 95 nt, Homo sapiens
cagagaggaugagagacaugccuaggguugcacaguccauagcagggaagucaguguucaaacccaggucugucugaugcccauacccuugacug

SEQ ID NO: 396760 - RNA, 59 nt, Homo sapiens
ggaaaguccuucuguaggcuccacauuucaccuggaugagccucgcugagggacucuuc

SEQ ID NO: 396761 - RNA, 60 nt, Homo sapiens
aggugcuugagguaggaggagcuuggauuacugauuuaagaccuuccuuccuuccuaccu

SEQ ID NO: 396762 - RNA, 69 nt, Homo sapiens
gcuuauccuucucauguaaggguauaguaaggaaauaaucuuugagaucuacuacuguaggaggugagu

SEQ ID NO: 396763 - RNA, 73 nt, Homo sapiens
ggaguaaggaaucaggucaucugaguuuaguucugucuccaccagugacuggccaggugacuaugcaagcucc

SEQ ID NO: 396764 - RNA, 76 nt, Homo sapiens
cugagguaauuuuccagauaauccccaccccaaaucggguaaugccuggccugauugaucaggacaguugccucag

SEQ ID NO: 396765 - RNA, 60 nt, Homo sapiens
cucuaaugauacuguguacaagggcaugaaaugaugcucuguggcuccagugucagggag

SEQ ID NO: 396766 - RNA, 106 nt, Homo sapiens
aagccggagugcucguugucaacauauuaauuauguucucuguuuccacaggcuuuucaggaggauuuaaucaguuggcauuuaugagccuauuuugaaaaugcuu

SEQ ID NO: 396767 - RNA, 69 nt, Homo sapiens
ggaaacuggccuggcgugcagaggggagggucgcagagucaaguccccucucaccaagguuagugggcu

SEQ ID NO: 396768 - RNA, 68 nt, Homo sapiens
uccugagagcagacccucuauaaaucacaggcaccuagaccccuguucucagggucugcguucaugga

SEQ ID NO: 396769 - RNA, 56 nt, Homo sapiens
ggaucacugugaaccgugucaggggcagauugcuagcacaggugucgaaguggucu

SEQ ID NO: 396770 - RNA, 92 nt, Homo sapiens
ggaggcauuggagcccuggggugcugguugggaugaccgccugagccacucuugcuguugcccuuagcacuucagccuucuccauauucucc

SEQ ID NO: 396771 - RNA, 77 nt, Homo sapiens
gggaacuuuucagaacauaaugugagcauauuugggaaaggcaaugugcaauucacuguuaugucugugcuuuuccu

SEQ ID NO: 396772 - RNA, 71 nt, Homo sapiens
cguguugccuaggcuggagugcagugguaugaucucagcucacugcaaccuccgccucccagguucaagcg

SEQ ID NO: 396773 - RNA, 77 nt, Homo sapiens
agguguuuacaguaggauuuucagggucuucaaucugucauauugcuagacauagacuuucuacugugucaucacuu

SEQ ID NO: 396774 - RNA, 64 nt, Homo sapiens
ccagauggucaccuucuugcucugucuucacaggguagagagagagagagagagggaucuuugg

SEQ ID NO: 396775 - RNA, 63 nt, Homo sapiens
gucauaucuagacuagacccaaauugaagcuacaguggcuucaguuugggucuagucuuugac

SEQ ID NO: 396776 - RNA, 109 nt, Homo sapiens
agcaaacaaggugauaugaagugaacuauaugugugugaacuuccuucacagucaaccaccugagaaguaaauuuauuugcaaauggaaaacauguauuacuuuuugcu

SEQ ID NO: 396777 - RNA, 82 nt, Homo sapiens
aguucuaggguacaugugcacaacaugcagguuuguuacauauguauaccugugccauguuggugugcugcacccauuaacu

SEQ ID NO: 396778 - RNA, 80 nt, Homo sapiens
cuggagauauuggaagaaagaaauaaacuaggguagcucauaucacccauuccauguuuuuugucuuuaggaugucccag

SEQ ID NO: 396779 - RNA, 99 nt, Homo sapiens
cuacugucucuuggcuuccaugaacacugugcggcuuccuguggcuccucugaaggaagucugcaguuuucuuuggcugcuguaaugcuuugacuuuag

SEQ ID NO: 396780 - RNA, 70 nt, Homo sapiens
gaugcuuuauuguuaggucauguaaaaauaagccuuuguuguacaguuaaaugcccuaaaauggagcauc

SEQ ID NO: 396781 - RNA, 79 nt, Homo sapiens
cuacacucuuggcaagaauguaugccgaucccaucauucuggagggggaauuggcacaauucuaugucuagaaacguag

SEQ ID NO: 396782 - RNA, 101 nt, Homo sapiens
ugaggcaggagaaucacuugaaccucgcagguggagguugcggugaguggagauugcaccacuguacuccagccugggcaacagagcgagauucugucuca

SEQ ID NO: 396783 - RNA, 69 nt, Homo sapiens
uacagucauaaugccuagugacagagauacguucugagaaaugcaucacuaggugauuuugucauugug

SEQ ID NO: 396784 - RNA, 73 nt, Homo sapiens
gucucgaaaggucccugcccaucccuuaagcuuggacccagggaagcuucaaguuggaagggaccuaagagac

SEQ ID NO: 396785 - RNA, 87 nt, Homo sapiens
ggcaaaggggucaacuuggaaaaggucaacuccccaaaaaauguaccuucucaaacugucagguugaccagauguccuuccuuugcc

SEQ ID NO: 396786 - RNA, 62 nt, Homo sapiens
gaaaaaggcuggcaugcuggcaugcacacaccccugucauccccugcaccaaccuuuacuuc

SEQ ID NO: 396787 - RNA, 62 nt, Homo sapiens
gcugcagcucuucucuccuucuugucaucugcaauguggcaagugggagggaguguuucagc

SEQ ID NO: 396788 - RNA, 65 nt, Homo sapiens
guggugagauggaguuggugucuuuugguuuuauuaaccuagggacuauuuacccaucucacuau

SEQ ID NO: 396789 - RNA, 127 nt, Homo sapiens
ccucacggugacucaguuuccccaccugcaaagaggcgaugaugacgaggucucuuggagccaucugugaaauggagguagagaugggaucuccauccuucccucggagacacuugagaacuggagg

SEQ ID NO: 396790 - RNA, 58 nt, Homo sapiens
guuuccuugaugguguugcccuucauaaagaugagcccuaagacgaucaucaggaggc

SEQ ID NO: 396791 - RNA, 78 nt, Homo sapiens
gcucaugccuguaaucucagcauuuugggcugaggcgggaggaucacuugagcucaggaguuugagaccagccugggc

SEQ ID NO: 396792 - RNA, 93 nt, Homo sapiens
ggccaggcaugguggcucacgccuauaaucccaacacuuuaggaggcugagguaaguggauuaugaggucaggaguucgggaccagccuggcc

SEQ ID NO: 396793 - RNA, 68 nt, Homo sapiens
uacuggaaacugauaauauauuagcacuuuauuuacaaugaccuucaaugaaguguuguccuccagua

SEQ ID NO: 396794 - RNA, 89 nt, Homo sapiens
ggccugggauaccaggucuggggaucucagggacucuuagcacuuuaagacacauguguucccaggcccugguguguuccucuagugcc

SEQ ID NO: 396795 - RNA, 129 nt, Homo sapiens
guucucuuaccaguggcucaaacuuggucgccuuugcucagauuugcuuuuguuaauucccccaaaaaaccacuaauuuaaggcuguuguguaauaggauuuacuaaagguuugaacaaaacagagggu

SEQ ID NO: 396796 - RNA, 77 nt, Homo sapiens
cgagcugugaaacccuaagaagaagggagcugaaccagugauugugaaacagcaucauucaucugggguaauacucg

SEQ ID NO: 396797 - RNA, 99 nt, Homo sapiens
ugguaccaucuguagcuguugacacccgugcucccuccagcugcucagcuuccagggcuggagcugugaaaguggcaugagggucaucauaucauacca

SEQ ID NO: 396798 - RNA, 55 nt, Homo sapiens
guguguaaauggcagugagcucuguaguuagucaggaucauggacaauuacacau

SEQ ID NO: 396799 - RNA, 60 nt, Homo sapiens
gagggcaagacuuguuaagaacagggugcucuggcauguuuuaaaguguuuuguuuccuc

SEQ ID NO: 396800 - RNA, 74 nt, Homo sapiens
gucuaguuuuaauacauuaagacagcuuuuccuuacuggccaggacauaugaugauuaaugguuggaacuggac

SEQ ID NO: 396801 - RNA, 57 nt, Homo sapiens
gugaacaauguuuuauccugggaaaucaguguaccucccauagguauuuuuguucac

SEQ ID NO: 396802 - RNA, 69 nt, Homo sapiens
guuugcaacauaguccuauguagugauuuuaaugauaucgcauacuuuacacauggauuuugugcaaac

SEQ ID NO: 396803 - RNA, 90 nt, Homo sapiens
gcagaucuugguuugcagauggaucauucuugccguauacucacauggcaagaaagaaaucaucugucuuaucucuagacucgaguuugc

SEQ ID NO: 396804 - RNA, 83 nt, Homo sapiens
cuacaaaauuugggauuauaguagugcuggcuauuaucucauuuaauccugaggauggcccaguuugcuaucccuauuuguag

SEQ ID NO: 396805 - RNA, 69 nt, Homo sapiens
auguugcuucuacaggagaccuuaaugacccacagaaccauaucaguaaagucacuggagaaggaauau

SEQ ID NO: 396806 - RNA, 60 nt, Homo sapiens
ugugaauggugcugcaaugaacauacacaggcaugugucuuuauaacagaaucauuuaua

SEQ ID NO: 396807 - RNA, 62 nt, Homo sapiens
auguguuuuuaaaugccuuuguuuauagcccuugcucuugaaugguaauuuaguaggcacau

SEQ ID NO: 396808 - RNA, 88 nt, Homo sapiens
aaaugugacugaccugccaaggcucaguuuaccuuugcaguugaaguccucaaagggcacugugcuuuggcaaguuugcuuugcauuu

SEQ ID NO: 396809 - RNA, 81 nt, Homo sapiens
ggauguuucacacucucaccaacauuuggcauuaucaauucuuuuaguuuuagcuguucuggagaguguguaauaguaucc

SEQ ID NO: 396810 - RNA, 90 nt, Homo sapiens
aaaucaggaaauacaggguuaguauugguaauuguaauggcaaaauauuuauuuacaagcacaaauuuaauccugucacuuuccugauuu

SEQ ID NO: 396811 - RNA, 65 nt, Homo sapiens
agcggagagauggaauauugguggccaucuuuagggacuaucuaccacauuccuucuuuccuguu

SEQ ID NO: 396812 - RNA, 56 nt, Homo sapiens
agacaccauuucaguacuagguugcuuaguaguaauacaaguugcagauggugucu

SEQ ID NO: 396813 - RNA, 67 nt, Homo sapiens
cuccggggcaggcacucacagcagccacaagcaccgccaccucguggccugugaguccuccccggag

SEQ ID NO: 396814 - RNA, 80 nt, Homo sapiens
aggugggggccaggggccagggugcagggacagggagcgccuugcccaugucauggugcucugggcccuggccugugcuu

SEQ ID NO: 396815 - RNA, 79 nt, Homo sapiens
ucugaauaccugaggcaaaaacacugauuaggcugugucccccuguuagcuuuguggggucuuuccucaaauccucaga

SEQ ID NO: 396816 - RNA, 96 nt, Homo sapiens
ggaaaaggcaaugauuuuuuaaaauguuauuuuguguuagggcacagauugcugugaauaaaguaguaauagcagcuaagcaguuuuguuauuuuc

SEQ ID NO: 396817 - RNA, 61 nt, Homo sapiens
cuagauuuucuuuucaaacaguggcagacauucuguagcuguauuguugaaggaaauguag

SEQ ID NO: 396818 - RNA, 74 nt, Homo sapiens
ucuauggauuuuuuucugaauguagaacuagguccucaaauaguuauugagcuaguggucauucaauccuuaga

SEQ ID NO: 396819 - RNA, 64 nt, Homo sapiens
auugugaauagugcugcaauuaacauaugugugcaugugucuuuauagcagcaugauuuauagu

SEQ ID NO: 396820 - RNA, 86 nt, Homo sapiens
ucucauucuggcaagagccgagggcaguuggguccauugaaccuguuacaucuaagcccgagucuuccagaaaauucuuauugaga

SEQ ID NO: 396821 - RNA, 55 nt, Homo sapiens
augugaugguuaauuuuaugugucagcuugacugggccaugggguguccacauau

SEQ ID NO: 396822 - RNA, 87 nt, Homo sapiens
agccugguggcuaaaagcaagggguggcaagcugggcugccugaguuugagucccaguuuugccacuuacuagccagccauguggcu

SEQ ID NO: 396823 - RNA, 68 nt, Homo sapiens
uuagugugcaaguauuaaucaucuagccaauaaugaccaaaucuaguugaaaugcaugugcacauuaa

SEQ ID NO: 396824 - RNA, 100 nt, Homo sapiens
gaggugagaggauugcuugaucccaggaggucgaggcugcagugagccaugauggcccuacugcacuucagccuugggaaacagaguaagacccugccuc

SEQ ID NO: 396825 - RNA, 71 nt, Homo sapiens
gguaccuuaaauuuuuuaaauauuauccauuauuagaguagcugguagguuuauaaagaauuuagugugcu

SEQ ID NO: 396826 - RNA, 68 nt, Homo sapiens
gagguggguggaucaccugaggucaggaguucgagaccagccuugccaacauggugaacucccaucuc

SEQ ID NO: 396827 - RNA, 83 nt, Homo sapiens
gugguuaggaugguuuuggugaugagagaugaugaaacuucauuggaauuucauugcugcuuaucuccagagaggucaaccac

SEQ ID NO: 396828 - RNA, 67 nt, Homo sapiens
gcuugcagaggcccuggggagaguaggcgcccccacucugcagccucccccaccuuccucugcgagc

SEQ ID NO: 396829 - RNA, 58 nt, Homo sapiens
uugcaaugugaugugauuuggauuuguguccccacccaaaucucacaucccauuguaa

SEQ ID NO: 396830 - RNA, 64 nt, Homo sapiens
auugugaauagugcugcaauaaacauacgugugcauguguuuucauagcagcaugauuuauaau

SEQ ID NO: 396831 - RNA, 87 nt, Homo sapiens
ucucaugcugugacucucuggagggaagcacuuucuguugucugaaagaaaacaaagcgcuucucuuuagaguguuacgguuugaga

SEQ ID NO: 396832 - RNA, 101 nt, Homo sapiens
ugagguggagucucgcuguguccccgaggcuggagugcaguggcgcgaucuuggcucacugcaagcuccgccucccggguucacgccauucuccugccuca

SEQ ID NO: 396833 - RNA, 75 nt, Homo sapiens
aauaauggagcugugauuugaguccagaucuaacaccacagauguucuuuccucuauguuacgguuccaguuauu

SEQ ID NO: 396834 - RNA, 59 nt, Homo sapiens
uccagacucagauuaauuugcagcuuggcuuuugggcuuuaaacugucuuggguuugga

SEQ ID NO: 396835 - RNA, 60 nt, Homo sapiens
ggaaugauuaagucauuucauggagugaggauuuuuauuucauggggauuuacucauucc

SEQ ID NO: 396836 - RNA, 70 nt, Homo sapiens
uguauuacagugguugcuauugugaauaaacaucuucuauuauauauucuuaauuuauuauugugguaca

SEQ ID NO: 396837 - RNA, 88 nt, Homo sapiens
gagguugcaacuagaaggagagacaggagcaggaaaugcaaauccacauuuaucuggcuccaaagucuauuuuuucuaguaguaccuc

SEQ ID NO: 396838 - RNA, 75 nt, Homo sapiens
guguuagugcucucguuagauguuucuguugauguuagaugucagaugauuccguugacgagaagggcugaccac

SEQ ID NO: 396839 - RNA, 89 nt, Homo sapiens
aaggcauaggcaugcugugauauuuccucaugauuagauucagcuuacaaaucuuuggcgggaauaucacaggagugacauaugaccuu

SEQ ID NO: 396840 - RNA, 130 nt, Homo sapiens
ugggaucugcacuaaagaggcacaugugaaccucaguuaagaaauacuugggguuaaaauaaggauaucacuaggucccguuucagacugagaauuagcuacaagucaggcccuuggaggauagaaccug

SEQ ID NO: 396841 - RNA, 107 nt, Homo sapiens
uuuguuugugucaagaccuuuuauuguagagauccuucacuaggggcaucuuguaugauuaaaucugaucgucugugguaagaucuuuaagauccugacuaaauaaa

SEQ ID NO: 396842 - RNA, 93 nt, Homo sapiens
uggagaagcuuaucaggaucacucccaaugucaauuaaugauguuuuaaaaaaugacauugggagugaagugaagaaagcaaaccauucucua

SEQ ID NO: 396843 - RNA, 86 nt, Homo sapiens
uuccagagaucaggauguggacuuuuauggaggguagaaagggauauuauucugccaaccacaaaauuuauucuugacuuuuggag

SEQ ID NO: 396844 - RNA, 98 nt, Homo sapiens
acaccgucauuuauguguccuccucgagcagugcaagucuaucauccugggugcgggaauggaacauaacuauuuggggagauguuaaauggaagugu

SEQ ID NO: 396845 - RNA, 68 nt, Homo sapiens
ggguacaugugcacaacgugcagguuuguuacauauguauaaaugugccauguuggugugcugcaccc

SEQ ID NO: 396846 - RNA, 82 nt, Homo sapiens
cuuuaggggguauauuuucuggaacuaugccugauagcaauucugcagcaaucuggauagucaggagauauauaccagaaag

SEQ ID NO: 396847 - RNA, 67 nt, Homo sapiens
guagugauccuuaauuauuacuuaggaauuacuuuaugauuugguaauauuuaaggacuuaagcuac

SEQ ID NO: 396848 - RNA, 80 nt, Homo sapiens
augcuagaccugggcaaaacuaagagcuguggguaaauuuaccuaugggccucagaaguuuuguacacaggcaucugcau

SEQ ID NO: 396849 - RNA, 78 nt, Homo sapiens
gucuguguguugaaggccaggcagggagcugugaacuguaggauguuuagcagcaucccuggccuguacccauuagau

SEQ ID NO: 396850 - RNA, 94 nt, Homo sapiens
cauguucaguauugaaauccauucuuggcuuugcuuuaauagcagagauuugacuucugacauuguugaucacagccauggaaauaaccacgug

SEQ ID NO: 396851 - RNA, 120 nt, Homo sapiens
guccccaauauuuuacaguguggaccauaggguagcugaucagaaucagaagggggcuucuugacacugcaguuuuccugggucccacccucuauauucucaauaaaaaucacuggggac

SEQ ID NO: 396852 - RNA, 98 nt, Homo sapiens
uguaaaugguugcauagcauauauuguagagucucugggccauacagucacuaaugcaaccauuccacucugcaauagugcuaaggcaaccauagaca

SEQ ID NO: 396853 - RNA, 68 nt, Homo sapiens
ggggguguguaugaacugaaggagcagaaucauuagcgagcagguuugagucauuggugagcaccucc

SEQ ID NO: 396854 - RNA, 62 nt, Homo sapiens
ucaguuugccaguauuuuauugaggauuuucacauugauguucaucagggauauuggccuga

SEQ ID NO: 396855 - RNA, 59 nt, Homo sapiens
gguauuauagguugcuguggggcuugaauaaaauagccaucagagugagauauaagauc

SEQ ID NO: 396856 - RNA, 81 nt, Homo sapiens
uucuacuuuuugugaagcaaauuaaucagggagacuuuugauguuuuguugauauggcugcuuaccauaauacagugugaa

SEQ ID NO: 396857 - RNA, 89 nt, Homo sapiens
ggcaaggccagaguuggcauggucugcccaaguuucccuaauucacuagaggagaggcagccugugccgaagucucucauggcccaguc

SEQ ID NO: 396858 - RNA, 55 nt, Homo sapiens
gagagaaugcagucuagauuccaucucucuaugugguuaaggcagcauuacucuu

SEQ ID NO: 396859 - RNA, 78 nt, Homo sapiens
uguucuuuuugcuuaggauuauuuggcuauuugggaucuuuuuuguuccagcuuuuucuaauucugugcaaaaugaca

SEQ ID NO: 396860 - RNA, 77 nt, Homo sapiens
gcaauaagggaauuucugggauaugaugggggaacgaauauugucaccuccauuugugucaggaagucucaguaugc

SEQ ID NO: 396861 - RNA, 66 nt, Homo sapiens
uggagguaggugauauguagcagagaagaauauguuaaaaaaucuggaugcaguuaccuauuuuca

SEQ ID NO: 396862 - RNA, 88 nt, Homo sapiens
gccaugacugugcuuguauguuuguucuuucagaugaucagaaaaaucacuucuuaaucuaaagaacagagcaaaauuccauuguggu

SEQ ID NO: 396863 - RNA, 128 nt, Homo sapiens
gagaaagggagagacauaauaagaugagauagaaauuguccaaauguuuacuuuuaccauccuuucaaucagaauuugaauauguuaaauaauguucuguccauauguccugugguccucccuaucuc

SEQ ID NO: 396864 - RNA, 55 nt, Homo sapiens
caugugugcugcaacaauugaaaugaucagauuuucaauuuuugcaguccacaug

SEQ ID NO: 396865 - RNA, 108 nt, Homo sapiens
ggaaaaucuuucuuuguccucaagauaauaauuaaaaauagucuaugcaagauuuauuuugaauagaagguuuuuuguucagauuaucauaggaaagagaauauuucc

SEQ ID NO: 396866 - RNA, 64 nt, Homo sapiens
uucaguuugccaguauuuuacugaggauuuucgcauugauguucaucagggauauuggccugaa

SEQ ID NO: 396867 - RNA, 64 nt, Homo sapiens
uucaguuugccaguauuuuauugaggauuuucgcaucgauguucaucagggauauuggccugaa

SEQ ID NO: 396868 - RNA, 63 nt, Homo sapiens
ggcuugggcucuggaggccagcuugcucuuguucugggcuguggccuuuggccaguccgaguc

SEQ ID NO: 396869 - RNA, 57 nt, Homo sapiens
gggggugagcucaguauuucauaaacaacuucaugagguuguuuuccugaguccucc

SEQ ID NO: 396870 - RNA, 73 nt, Homo sapiens
uguuuauuuuguucccugcuguagcuccagcacuuugagcagugccagagacguagggaauauucaaucaaca

SEQ ID NO: 396871 - RNA, 63 nt, Homo sapiens
aucagaaucucuagugggaccaagagaucuauauuuuaaacaaguacccuaggugauucugau

SEQ ID NO: 396872 - RNA, 79 nt, Homo sapiens
gauaccucugagcuagggccuggaauagggccucuugauucuuacuggugcccuauccugcuguggcugagcugguguc

SEQ ID NO: 396873 - RNA, 93 nt, Homo sapiens
ucuauuucuuugucucuguacaguggguguagggaccagccccacagggucggcggguuuuucuccccauguguggagacaagagauuguaga

SEQ ID NO: 396874 - RNA, 112 nt, Homo sapiens
guguuaugcuggguaagguuuggcaaauagguuuuauugcauugccaauuuuguuugauuggagauuugcuuugagggcuguguugcagaugacucuguauccguguaauac

SEQ ID NO: 396875 - RNA, 55 nt, Homo sapiens
ccaaagaaucuguagcuggcaggaccaaaggaucugauguuauaaaauucuuugg

SEQ ID NO: 396876 - RNA, 78 nt, Homo sapiens
guaugucaguuucacucagcuggaacugugguuccaucuccaagggauucuguuucucugauugaacucugacagugc

SEQ ID NO: 396877 - RNA, 99 nt, Homo sapiens
gaggcaggagaauugcaugaacccggcaggcggagguugcagugagcagagauugcgccauugcacuccagccugggcgacaaagcaagacuccgucuc

SEQ ID NO: 396878 - RNA, 100 nt, Homo sapiens
uuauuccuucauguuucuaaugagggguauauauacagugugaugaaaacacuaaaaucacauuguauauguaccuaucauuggaaacaugaaggaauaa

SEQ ID NO: 396879 - RNA, 81 nt, Homo sapiens
uucugcagguucacaguuaggacaacugcuucacacuuguuaaauguguuaaguugugguucuaaccaugugauaucagag

SEQ ID NO: 396880 - RNA, 99 nt, Homo sapiens
uagaauucuuauaguuugaggucuuacauuuuaauauuuauaucaucuugaguucaguuuuguauguguugaaaaguagggcuccagcuucauuuucug

SEQ ID NO: 396881 - RNA, 56 nt, Homo sapiens
gacucuguagacaaucacaucugaugguauaaccugggaugugugcuacaagaguc

SEQ ID NO: 396882 - RNA, 97 nt, Homo sapiens
augcaaaggucuauguagggcuuaucuguguagaguucuguuccacucugugugugugugagcucuauaggauggguugcacauggucuagauguau

SEQ ID NO: 396883 - RNA, 68 nt, Homo sapiens
uugcuuucauguagucaucauccugcucaaaaaucuuugaggccaggugcgguggcucaugccuguaa

SEQ ID NO: 396884 - RNA, 129 nt, Homo sapiens
agaaaaaaaaagggaauggggugggggauggaaauagcaccaggguugacugaccuuuaccgaggagggaaggcuuaguguuuucagccuggugucccccgugucccgauugcagcccccuguacuucu

SEQ ID NO: 396885 - RNA, 106 nt, Homo sapiens
uucuuucaugauauugaaaagaacuggaagaagugaaagcuuugccacauugcuugcauucauaguguuuccuuccagugugagucuuuucaugucuaugaaagga

SEQ ID NO: 396886 - RNA, 64 nt, Homo sapiens
uguggcucuucuguucuccacugcaggaacauugcugcucaaaaaagagagggauagagcuaca

SEQ ID NO: 396887 - RNA, 77 nt, Homo sapiens
auacuauugcacuggggguuagaauuucaaucuaaaaauuuugaugaggacacaaacauucagugcauacagagugu

SEQ ID NO: 396888 - RNA, 69 nt, Homo sapiens
uuguuuaagacagggucucacucugucacucaggcuggagugcaguagugugaucuuggcucacugcaa

SEQ ID NO: 396889 - RNA, 58 nt, Homo sapiens
cugaggaauguggccaccucccugcacccuuaaagcugagcagccacagauuccucag

SEQ ID NO: 396890 - RNA, 72 nt, Homo sapiens
ugcagacuacugugauagagaaugguggagaacguggcagcauuucuccucauccugucgauagcaccugca

SEQ ID NO: 396891 - RNA, 99 nt, Homo sapiens
cugucaaggauauuaaaaaggaguuauucaguugggcuagagguuagacaagguaucuggccuacaaguaauuuuauuuuacuucguguuacuuggcag

SEQ ID NO: 396892 - RNA, 105 nt, Homo sapiens
gaggccccuuuauucuggcagcucuuuuauuccaguugccacauguacacuagagagaugucugaugauguuggaaacuuggugcggcugccccuuggaggccuu

SEQ ID NO: 396893 - RNA, 56 nt, Homo sapiens
ccucuggaaucuagaaaagguaaggaaacaaauccuucccugaagauuccagaagg

SEQ ID NO: 396894 - RNA, 71 nt, Homo sapiens
aguuuugaauccucuaauaugugaugcauagacaucuaaacuauuccacacuguuggugggauugcaagcu

SEQ ID NO: 396895 - RNA, 82 nt, Homo sapiens
aguuuuaggguacaugugcacauugugcagguugauuacauauguauacaucugccaugcuggugugcugcacccacuaacu

SEQ ID NO: 396896 - RNA, 88 nt, Homo sapiens
aaugacugaaacucagcucugguuacaaaggcaaauuucuaguuagguuuucaguuuguuuauguacuaagcuagguugcaguucauu

SEQ ID NO: 396897 - RNA, 84 nt, Homo sapiens
ucauuauuaucacuacuuaaugugaacagcuaucuugucaguguauacauauacugauucaaagcuguuggcuuaauauaauga

SEQ ID NO: 396898 - RNA, 55 nt, Homo sapiens
uugagauggugucaugcucugucacccaggcuggagugcaauggcaccgucucgg

SEQ ID NO: 396899 - RNA, 98 nt, Homo sapiens
cuugccuuuccaguuuuguaggugcaguuugaaaguagaaacaugaaguuuaacugcauuauuuuuaaaaaauugccucgaaugcagaaauaggcagg

SEQ ID NO: 396900 - RNA, 61 nt, Homo sapiens
ggagaggagagaaagaggccaaaaauuuuuuugaauaauggccagaaacuucuuuucaucc

SEQ ID NO: 396901 - RNA, 55 nt, Homo sapiens
gcaaugcugucugugcacagaucaugaggaaggucuguggguuuugcagaguugc

SEQ ID NO: 396902 - RNA, 62 nt, Homo sapiens
ucacgauacuauucucauucuccauaucuuacuggauuuuggaggacaagcauggauaguga

SEQ ID NO: 396903 - RNA, 58 nt, Homo sapiens
aacaccgagauuaaauguaagcuguuacuuauuaucaagcuugcaucauuuuguuguu

SEQ ID NO: 396904 - RNA, 74 nt, Homo sapiens
ugauuugaucuguuuuccuauuguuuguugaugcuuuuauugacagaauuaaugaaaauuacaagguuaaguca

SEQ ID NO: 396905 - RNA, 70 nt, Homo sapiens
gcauucaaaccgcuggcuauauccuugccaaaguauauaacuuuggucaaaauaaguaaguugucuaugc

SEQ ID NO: 396906 - RNA, 63 nt, Homo sapiens
uacuuagaugaugcuuaaacaugcacagaauuacacuuggcuguacacauauacaucuaagua

SEQ ID NO: 396907 - RNA, 129 nt, Homo sapiens
uaaaacccucacauauacacacaaaccccaccucucccaguguuuauuuugagccaauuuccaaagcuaauggguuuagaggaagcacuugaagauguggaguuugugugugccuguuuggggguuuug

SEQ ID NO: 396908 - RNA, 90 nt, Homo sapiens
cucacggagaacaucuacuagaguagugcagaggggaaauguggccccacacaggauccccacuggggcacugucuaguggagcugugag

SEQ ID NO: 396909 - RNA, 77 nt, Homo sapiens
cacugugggccuuggucugugauaugugcuggcuucaggugugacgcagcacauucacagcuaugguggccauggug

SEQ ID NO: 396910 - RNA, 101 nt, Homo sapiens
ugaggcaugagaaccacuugaacccaggaggagaaugcugcaaugagcugagaucacgccauugcacuccagccugggugacagagugagacucugucuca

SEQ ID NO: 396911 - RNA, 89 nt, Homo sapiens
uaaguaucaguuuagcuaugauagauuagguuagauuacucagaaaaaaugccucaaaagcuucuaagucauaauugaucugauacuug

SEQ ID NO: 396912 - RNA, 67 nt, Homo sapiens
ggauauaaagaguuaguaaaauuuccucuauccauuugggguauaggaaacaaacucucuuaaaucu

SEQ ID NO: 396913 - RNA, 67 nt, Homo sapiens
gaaaaagacacuaucaacaaagagcaguggacuaaaauucagcaucaaugucuauaguguuuguuuc

SEQ ID NO: 396914 - RNA, 100 nt, Homo sapiens
augaccccuugaucuggaggcugacuuagagauguuguauuugggggcauguauaccucuuuguuguugaauucauggcauucuggguggccaggggcau

SEQ ID NO: 396915 - RNA, 66 nt, Homo sapiens
gaguccucaguggauguucucacagcuguuguuagauggccauccccugagauccacugaagauuc

SEQ ID NO: 396916 - RNA, 76 nt, Homo sapiens
uggagugacauguuuacaguguugagagaaauagaacaccaaacuagaauucuguacccuguaaaaauauccuuca

SEQ ID NO: 396917 - RNA, 62 nt, Homo sapiens
uaguuugauccuaacauccgauguguauucuaauaucuuugguaugaaaaggaauuagacua

SEQ ID NO: 396918 - RNA, 62 nt, Homo sapiens
uuuaaucuuuucugcuggaagaugcaagaauaauuuuaugcagucauuuggaaaagguugaa

SEQ ID NO: 396919 - RNA, 65 nt, Homo sapiens
uuaaacugcagacucaguguucagaaugggaaaacuauaaaguucgagaacugagaugcguuuga

SEQ ID NO: 396920 - RNA, 84 nt, Homo sapiens
guugcacguaauagucucaaacuccuggacucaagccaucugcccccauuggccuuccaaaguguugggauuauaggcaugaac

SEQ ID NO: 396921 - RNA, 59 nt, Homo sapiens
acuccauuuggaacagauguccugcccuucaucucuccagggccuuggccagauggggu

SEQ ID NO: 396922 - RNA, 73 nt, Homo sapiens
cuccuauuuccgugacaaucagauagcuacaacuuggagccaggccccuaagugaacugucacugagaaggag

SEQ ID NO: 396923 - RNA, 83 nt, Homo sapiens
accgggauuaacacucaggcacucugauuccagugcuguguuuuuaaccauuagaguuaagugccuguauuuguuuccuaggu

SEQ ID NO: 396924 - RNA, 92 nt, Homo sapiens
aauuaaugguagagcuggaguuaggacacaugucucacaguuccuaguucguuuugcuuugaugugcuugaaauucaguuuugacauuaauu

SEQ ID NO: 396925 - RNA, 76 nt, Homo sapiens
ugggucuguaagagugguuacaccaagggcacuccuguuaucuauuauuguugauguugccacuguuauuaaccua

SEQ ID NO: 396926 - RNA, 61 nt, Homo sapiens
guggggguguaggcaguggugggaggagauuuggcaccuacuacccuguccccaccuuuac

SEQ ID NO: 396927 - RNA, 77 nt, Homo sapiens
ucuucagcagugguuuuaaguagagcauacuaaagcaauaguagugugcaggauuuugaugccaucuccgcugaagg

SEQ ID NO: 396928 - RNA, 67 nt, Homo sapiens
aguggggaaauaucaauauuugaucaaauuaacacuaccuccuucccaguguugguguucacucacu

SEQ ID NO: 396929 - RNA, 68 nt, Homo sapiens
augcagagucccagccccuagcccagaucuacugacucaaucucugggugaggccugggaaucuguau

SEQ ID NO: 396930 - RNA, 88 nt, Homo sapiens
ucaagguacacaaugugaugauuugauaaacguauugggaaaugauuaccacaaugaaauuaaucaacacauacaucaguacacuugg

SEQ ID NO: 396931 - RNA, 75 nt, Homo sapiens
guaguaauuagcacuugggaguauuuauuuauuuauuaaauauuuauugauuaaauacugcaggcuaagcacuau

SEQ ID NO: 396932 - RNA, 74 nt, Homo sapiens
ugcagucacagugacaggaugugguucucaucuuggccaagaacaacagcuccauauucugccauugcauugca

SEQ ID NO: 396933 - RNA, 125 nt, Homo sapiens
caggguuugcaagagcuaugguuugcguauuucuccccucucaaaugcauguugaaauguaauugcuauugcaacaguguugagaggugagacguuuaagaggccaucaguccaugagggcucug

SEQ ID NO: 396934 - RNA, 71 nt, Homo sapiens
auuucugugucuucaguucuuagcucauaguagguauuuaauacauauuuguaggacuaaagacuagaagu

SEQ ID NO: 396935 - RNA, 83 nt, Homo sapiens
cagcucgacagggagaguuuacuguuacauuuaaauaaaaauuucucuuugaauuugucaccucucucccuuuuagacggcug

SEQ ID NO: 396936 - RNA, 57 nt, Homo sapiens
uuuugaggaacuuuauucuuaucuauauccaggauacacugugagguauccucaaaa

SEQ ID NO: 396937 - RNA, 99 nt, Homo sapiens
aggaagcaagaauguaaugaggaugaaguguuuggaaguuuaagaaaagggaucaaaaagucaguaauucucugaaacucuugacauccuuuguuuccu

SEQ ID NO: 396938 - RNA, 91 nt, Homo sapiens
cugggagaugcuaugguguuauuuuugcacuacaagggcucugaagacugccaggcuugaagugaagaacaauaucaccugccuaucccag

SEQ ID NO: 396939 - RNA, 83 nt, Homo sapiens
cccuccguggccuuuguuucauagggugugagaggaugaacaacgucuucucaauggguuguagacaaagugugauaagaggg

SEQ ID NO: 396940 - RNA, 58 nt, Homo sapiens
acccaggaggcggagauuacagugagcugagaucgcaccauugcacuccagcaugggu

SEQ ID NO: 396941 - RNA, 82 nt, Homo sapiens
aacuagccagugugguagugcuuaccugcagucccagccacucaggaggcugaggugggaggauugccuaagcucgggaguu

SEQ ID NO: 396942 - RNA, 89 nt, Homo sapiens
ucucacuaugucuccucagcuccuaucucuguauggccugguuuuuccuagguuaugauuauagagcgaggauuauuauaauauuggga

SEQ ID NO: 396943 - RNA, 60 nt, Homo sapiens
caggaaugugaggguucccugccugaaaaguuaguaaggcagaggagaucucauguccug

SEQ ID NO: 396944 - RNA, 64 nt, Homo sapiens
ucagaacuuguguugcuucacauguacguuauuuuaaugauaaaugguaaaagacaaguccuga

SEQ ID NO: 396945 - RNA, 91 nt, Homo sapiens
agugaaugcaguggaggauaagggaagcagcuuuuauugaucuuguuauuuauaugaaaacaugauuugccuguuuaccacaguguucauu

SEQ ID NO: 396946 - RNA, 74 nt, Homo sapiens
agucuuuguguuuucuagguuuuaacacauagguuuucauuuaucuugaguagauaccuaggaauagaauugcu

SEQ ID NO: 396947 - RNA, 97 nt, Homo sapiens
gaaaguuauuaaaguagaauguuucaacccagaauguuugacauagauacacacacuaugucaaauucuggguuaaaacacugauucacugauuuuu

SEQ ID NO: 396948 - RNA, 90 nt, Homo sapiens
ccaggcuugaucgagaaaugagaaacccauuuuacaggugaacuaaaaugagauagguauuucauuuacccuuuuacaaaggccaaaugg

SEQ ID NO: 396949 - RNA, 78 nt, Homo sapiens
cauacagcugauugucaaagugauuguaauuagguccuccaauuucaucugcaguacuucgcuuuuauuuguuguaug

SEQ ID NO: 396950 - RNA, 61 nt, Homo sapiens
ucagugcuuaguacuaacagguccucaauguacauuuauggaauguuaaagacuacacuga

SEQ ID NO: 396951 - RNA, 64 nt, Homo sapiens
uuucuaaugcacugaaaaguaaugauuguaacuuguuaaaaauguugucagugcauuuaagaga

SEQ ID NO: 396952 - RNA, 71 nt, Homo sapiens
cuugagcccaggagauggagguugcagugagccaagaucacaccacugcacuccagccugcuggauuuagg

SEQ ID NO: 396953 - RNA, 55 nt, Homo sapiens
ugacuugauccauggggcuccaggaaaaugugcuaagagcaacaggaacaaguua

SEQ ID NO: 396954 - RNA, 61 nt, Homo sapiens
agaagauaacugagaaggacuuccccuuaaacaaacuuuagucauuucucagcccucuucu

SEQ ID NO: 396955 - RNA, 59 nt, Homo sapiens
ugugccaaucauagggcuugguuuauuaauuuucacaaccuaccugagcaauuggcaua

SEQ ID NO: 396956 - RNA, 99 nt, Homo sapiens
gaggcagaagaaucgcuugaaccggaaaggcggagguugcagugagcugagaucaugccacugcacucuagccuggaugacaaagugagacucugucuc

SEQ ID NO: 396957 - RNA, 108 nt, Homo sapiens
gcagcuacacugguuucccuggugaguugacuuugaaugaucuuggcaaguaaauaggccugagauaguguggguacagcuauucugaaaggcaagaagguagacugc

SEQ ID NO: 396958 - RNA, 55 nt, Homo sapiens
aagagugguuucaggucacuaagauauaaaaggaugggaugugagguacacucuu

SEQ ID NO: 396959 - RNA, 59 nt, Homo sapiens
agcaagacauggcuuccaaaugcggcugguaagaggcucugggagaguucauucuugcu

SEQ ID NO: 396960 - RNA, 81 nt, Homo sapiens
uagguuaaaguuauugccccucaguuacacaauaauucagcaagacuggaaaucuguuauuuaggaaauaauuuuagcuug

SEQ ID NO: 396961 - RNA, 74 nt, Homo sapiens
acguaugggaaggacauucugggcucaggaacauccaguacaaaggcccugaggugggaguuuuucucauaugu

SEQ ID NO: 396962 - RNA, 84 nt, Homo sapiens
aaugugacgucuuuagccagguacuuaauuauuuuuccacauuuuaaggguuaaagagcugagaccugguggaguuaaaacauu

SEQ ID NO: 396963 - RNA, 76 nt, Homo sapiens
uucuucucuuuugccugucuuuguucucuaccaaggagagaacuggcuuaaggaugggccacugaaaagagaagaa

SEQ ID NO: 396964 - RNA, 55 nt, Homo sapiens
guguuugcucugauccaaucugcuuucuugcaccuuuuugaauagagccaagcac

SEQ ID NO: 396965 - RNA, 80 nt, Homo sapiens
aggguucaguggagugggucaaaaugugcuaguugugggugggacuccacagugugucaccauugagucauuuccucccu

SEQ ID NO: 396966 - RNA, 66 nt, Homo sapiens
gcugcuaugaaagauaaucaaagcuaaagcugauugccaguuacacauuuagaucuuuuaugcagc

SEQ ID NO: 396967 - RNA, 71 nt, Homo sapiens
ugauaauugcagacgugguaguacaguauuuuaagucaauccccaugucuugaaugccacuuguuuuauca

SEQ ID NO: 396968 - RNA, 56 nt, Homo sapiens
cuucucagugcucaucuuauuuaauauuggcagugggacugugaugcauugaggag

SEQ ID NO: 396969 - RNA, 79 nt, Homo sapiens
cuaaaaaaaauggagagccaugcuaugcucaugguucagaagacuaauauuaguaagauggcaacucuccacaaauugg

SEQ ID NO: 396970 - RNA, 72 nt, Homo sapiens
cacuauugcccaggcuggagugcaguggugugaucucggcucacuguaaucucagccuacuggguucaagug

SEQ ID NO: 396971 - RNA, 68 nt, Homo sapiens
aguccaugagaaugaagccuggcgugugaggcgggccacagauguggguguuuucauucuagagggcu

SEQ ID NO: 396972 - RNA, 88 nt, Homo sapiens
aagaaacagccuuguuuuuguuguugaaauuccuaugcauuauauugcauggcuuguuaugcauuaguaccuaagguuuaaguuucuu

SEQ ID NO: 396973 - RNA, 78 nt, Homo sapiens
ccacccggcuugggcagcauccaugugcuuccucucccguggcacauaagcaggugucugugucuguaaaccgggugg

SEQ ID NO: 396974 - RNA, 79 nt, Homo sapiens
ccuggguguauucauuggccugaucaacacaaugaccaaaucuggucacagugcaggaucaguuaaugacuguccuagg

SEQ ID NO: 396975 - RNA, 63 nt, Homo sapiens
cugccaacggggcacggugcgugggaugccaagcugacaucacuaugcaggugucucgggcag

SEQ ID NO: 396976 - RNA, 80 nt, Homo sapiens
uuuaaugugaagugaagacucacagaaggccuggacagcugccugguccuuccugagucuuugaagcuuccaucauugaa

SEQ ID NO: 396977 - RNA, 88 nt, Homo sapiens
gaugaggaagccuucauccuucucaaggagccuucguaacugucagugggcaaguuacugagccuuucggaaccucaguuucuucauc

SEQ ID NO: 396978 - RNA, 55 nt, Homo sapiens
gacaguaaagucaggauucacauccaggugaucugacuccagagacugugcuguc

SEQ ID NO: 396979 - RNA, 56 nt, Homo sapiens
gcaggaugguuuuaauucuucaggucaguagaugugaugguuuggaagcuucuugc

SEQ ID NO: 396980 - RNA, 55 nt, Homo sapiens
gggagggaagaaggcuuauaggucagauggggcugccaugauacugcucccucuc

SEQ ID NO: 396981 - RNA, 112 nt, Homo sapiens
gcuacccaggcuggaaugcagugaugugaucauagcucauuguaacuucaaacuuucaaacuccugggcucacaugaucacaugauccuccugccugagccuccugaguagc

SEQ ID NO: 396982 - RNA, 68 nt, Homo sapiens
gagacaugaggaucucuugagcccagaaguuugagaccagcuugggcaacauagagagaucccgucuc

SEQ ID NO: 396983 - RNA, 81 nt, Homo sapiens
auucccucuucaccaguuuggcagucucaucuucagagcaaaagauacggugugaggcugaaacuggcgauagagugggau

SEQ ID NO: 396984 - RNA, 60 nt, Homo sapiens
uggcuuacaccuguaauccagcacuuugggaggccaaggugggaggguugguguaggcca

SEQ ID NO: 396985 - RNA, 60 nt, Homo sapiens
ucaucuuuuggauauuuucaucagcugccaccaugcagccugaggucugagaaagaauga

SEQ ID NO: 396986 - RNA, 64 nt, Homo sapiens
guugugaauagugccgcaauaaacaugcgugugcaugugucuuuauagcagcacgauuuauaau

SEQ ID NO: 396987 - RNA, 100 nt, Homo sapiens
ugagacagaagaauugcuugaacccggaggcagagguugcagugagccaagauugugccauugcacuccagccugggugacagagcaugacuccgucuca

SEQ ID NO: 396988 - RNA, 58 nt, Homo sapiens
auucuucuaucucuguguuuccuauaaaugaaucauuggauuugcagaguaggugaau

SEQ ID NO: 396989 - RNA, 76 nt, Homo sapiens
gggcuuuacagagguaguuuaguuuuggggaagggcuauugcuauuaaacuauaaacuaaauuucucccaaaguuc

SEQ ID NO: 396990 - RNA, 80 nt, Homo sapiens
auucuuuaaaugcucuguggguaguaaugaaacacguuuagcaaaccuaggccauugcugauuauagaacauaugagaau

SEQ ID NO: 396991 - RNA, 90 nt, Homo sapiens
ugccaaguaauaucucacugcauggucuagcuggguugacaucccauugcacgcucuagcugggcugugaaggagcagacugcuugugca

SEQ ID NO: 396992 - RNA, 76 nt, Homo sapiens
guacuuauucuuaaccuugaaguuauauggccuuccugaauguaagggccuauucaggguggagaguaugaggugc

SEQ ID NO: 396993 - RNA, 64 nt, Homo sapiens
uucaguuugccaguacuuuguuguggauuuucucaucgauguucaucagggauauuggccugaa

SEQ ID NO: 396994 - RNA, 57 nt, Homo sapiens
uuguguguguggugugugugugugugucugugugcauacguacauaugcacauaugg

SEQ ID NO: 396995 - RNA, 86 nt, Homo sapiens
cuauuagguuggugcaaaagugauuguaguuuuugccauugaaaguaauggcaaugaccgcaauuacuuuugcaccaaacuaauag

SEQ ID NO: 396996 - RNA, 60 nt, Homo sapiens
uccuugagucugaacuuuggauuuugaauuaaugccaaaacaaguucagauugucaggga

SEQ ID NO: 396997 - RNA, 63 nt, Homo sapiens
ccauguguccauguguucucaucauuuagcucccacuuaaaagugagaacaugugguauuugg

SEQ ID NO: 396998 - RNA, 57 nt, Homo sapiens
uagucuuuccuggaacgaucagucauugugcuuuggcugagaucaggauuaaggcua

SEQ ID NO: 396999 - RNA, 64 nt, Homo sapiens
ucuguguaaaacaauuagaggauuuuuuaaaaucuuaaaagucuucacuguguauuacaauaga

SEQ ID NO: 397000 - RNA, 129 nt, Homo sapiens
uuaaauuuaagggauguaagugcaguuuuguuacauggauauauugcuuagugaugaagucugggcuuuuagugcaaccaucaccugaauaauauacauuguacccuugcagauaacuuuuuuuuuuaa

SEQ ID NO: 397001 - RNA, 78 nt, Homo sapiens
gacagauauuaaugugcaaauuagcacaacccgacuggguccagauugccacuuagaauuugcauauuaauaaauguu

SEQ ID NO: 397002 - RNA, 93 nt, Homo sapiens
cugagugaccuauaugagaugaguugcuggcucugauccauucucucaugauuagaugaccacaacucaugaucuguauugguggguacucag

SEQ ID NO: 397003 - RNA, 55 nt, Homo sapiens
aaggaguguggugaucuugggcagauuacucuagucucugauccucacauuuuuu

SEQ ID NO: 397004 - RNA, 59 nt, Homo sapiens
ugggugcaggaaaacuaccuggaguaccggcagguacccggcaguaauccugcgcgcua

SEQ ID NO: 397005 - RNA, 85 nt, Homo sapiens
gugugccccugcgugcaugcagcacacaugucugugcgugggugaguggacaugcgcugugugcaccugcaugcauguggcacac

SEQ ID NO: 397006 - RNA, 89 nt, Homo sapiens
gaagcaagugcuuuacacaugcaugauuuuaucaaggagauuauggagaccuugaaggccauccaugcauguuaaaaaccuuugcauuc

SEQ ID NO: 397007 - RNA, 58 nt, Homo sapiens
gucacuggcugucuuguaugauuuaacugacaguucuuuauccaugcaguacagugac

SEQ ID NO: 397008 - RNA, 65 nt, Homo sapiens
gaagagcuagugcuuaugcaccacucucucuccugucugugagagugacucacacuagcugcuuc

SEQ ID NO: 397009 - RNA, 81 nt, Homo sapiens
ucagaucaugaaaccuuugggcagagaguagaggguuuuccaaguauagaaucauauugucugccaagagggauaguuuga

SEQ ID NO: 397010 - RNA, 79 nt, Homo sapiens
aaccaggagaggggccagcuagaucauuucuagagauggaugagaaaugcauggacagcuggucuuuaacuucaugguu

SEQ ID NO: 397011 - RNA, 72 nt, Homo sapiens
uucugucucuauggauuugccuauucuguauuucauauaaauagaagcauaauucagccacaagagauggaa

SEQ ID NO: 397012 - RNA, 69 nt, Homo sapiens
gcuaacaccuugcucugucaauaagcuguucuaccaacuucagaauuauucacagauggguguguuggc

SEQ ID NO: 397013 - RNA, 60 nt, Homo sapiens
aucaggagcaguggcugcagaacagcgccuauuggugaauugcaaaugcugcugccugau

SEQ ID NO: 397014 - RNA, 89 nt, Homo sapiens
ggagaauugcuugaacccgggugguggagguugcagugagccuauaucguuucauugcacuccagccugggcaacaagagcgagacucc

SEQ ID NO: 397015 - RNA, 72 nt, Homo sapiens
agggaacacuuuuacacugguggugggaauguaaacuaguacagccuauagaaaacaguguggagauuccuu

SEQ ID NO: 397016 - RNA, 129 nt, Homo sapiens
agcuguguuuuuucugcuucuuauaguccaucaucaccaguaauaaagagccugcaaauuugucagccaaguccugacaguaaaaucuuuauugcuggugaugauguaagaggcuaaagggacacagcu

SEQ ID NO: 397017 - RNA, 65 nt, Homo sapiens
uuuguuuacuacucucuaugaccaguuuugugcuaggacugguagaguugaguaguugccacaga

SEQ ID NO: 397018 - RNA, 74 nt, Homo sapiens
uucuugguggaaauauuuuuuacuucauucucuauguaguagcagaaaauauuuuauaugaccacacacaggaa

SEQ ID NO: 397019 - RNA, 66 nt, Homo sapiens
auugugaauagugcugcaauaaacauacgugugcgcauguguccuuauagcagcauguuuuauaau

SEQ ID NO: 397020 - RNA, 60 nt, Homo sapiens
acauugcauuuucagguuggucugcaucugugcaggaccaacuguugcagaugccucugu

SEQ ID NO: 397021 - RNA, 77 nt, Homo sapiens
cggguugaauaccuaggugauggguugauagguacaggaaaccacuauggcacacguuuaccuauguaacaaaccug

SEQ ID NO: 397022 - RNA, 130 nt, Homo sapiens
acuccuggccucaaguaauccaccugccuuggccuccgaaagugcugggauuggcugggcgugauggcucacgccugcaaucccaauacuuugggaggccgaggcggguggauugcuugaggcuaggagu

SEQ ID NO: 397023 - RNA, 62 nt, Homo sapiens
auggugcugggauaacuggcuagccauaugcagauugaaacuggaccccuuccuugcaccau

SEQ ID NO: 397024 - RNA, 74 nt, Homo sapiens
ucagauuuacuuaagcccaguuauauaauuuccauacagaaggacuuauggccacugucuuugagucacucuga

SEQ ID NO: 397025 - RNA, 58 nt, Homo sapiens
ggucaacaucaucaugguaagugauauugacaguacguacccuugauaggaugugacc

SEQ ID NO: 397026 - RNA, 63 nt, Homo sapiens
gggguguuguuuuauugguugcagugagcacaugucaauuuuguaacuggagaguaacauucc

SEQ ID NO: 397027 - RNA, 82 nt, Homo sapiens
cugguaggaggugauuggcucauggggguggguuucucauaaaugguuuaacaccaucccuuugaugcuuuccuccuaguag

SEQ ID NO: 397028 - RNA, 81 nt, Homo sapiens
agcuguauuacaaacaauuuguuucuaauaaugguuagaguacugacguuugcaaauuguuugguauaaauuagagcagcu

SEQ ID NO: 397029 - RNA, 66 nt, Homo sapiens
cuuugaaacuuacuguuaauuuucugucucguugaucugucuaauguugacaguggguuguuaaag

SEQ ID NO: 397030 - RNA, 124 nt, Homo sapiens
uuaguggguaacuaaagguaauggugaguggugccacuuccauuucuacuccuugaguccuggguggaaaucaagggguggaaaugguaguguaaacugguauaauagacuuuuagacuauuaa

SEQ ID NO: 397031 - RNA, 94 nt, Homo sapiens
uugguaucagcaugauacuggcuucauagaaugauuuagggaggauucccucuuucucuauccuguggaauagugucaacaggauugauaccag

SEQ ID NO: 397032 - RNA, 84 nt, Homo sapiens
uguguuuuguaauuagucauugcccccuggggugagguugggaguuuucaccggagguggguugaccagauuugcaaaaugaca

SEQ ID NO: 397033 - RNA, 80 nt, Homo sapiens
gacuuugguauugugagaacuguagggaacagccuugcuuuguaagcuuagggauuuacagucucaagagugcugcaguc

SEQ ID NO: 397034 - RNA, 85 nt, Homo sapiens
uauuauagcaacagaaagacaacauaggaguaaauguaacaagaaauguuacaguggugaccuuguauugcaguguuguguagug

SEQ ID NO: 397035 - RNA, 80 nt, Homo sapiens
cugccagguuuugaggccugauaacacacugagauuaauacauggcucaaugauaguacaaucagccuaugaccuggugg

SEQ ID NO: 397036 - RNA, 95 nt, Homo sapiens
ggggagacagaguucauggcuuugaagugagacacauucggguucacauccuagcccuugcacuucagagcugcauagcuugggucugucuuccc

SEQ ID NO: 397037 - RNA, 65 nt, Homo sapiens
uuuuuuguagagacaggaucucacuauguugcccaggcugguuuugaaccccugcucucaagaaa

SEQ ID NO: 397038 - RNA, 58 nt, Homo sapiens
guaggauaugaggauuuuaagacagucagcuuauagcuguuuugcucuuuauaccuau

SEQ ID NO: 397039 - RNA, 77 nt, Homo sapiens
cuuuucuccccuuuacccugaggaaucuauuuugguuaacaggucaaaauuuuuuuccagguaguaggggaggaagg

SEQ ID NO: 397040 - RNA, 90 nt, Homo sapiens
accccacaguccccacccuugcagggacagcuuugucaugcggguagcauaguacauguuugaaggugcccaugaagguuggggaggggu

SEQ ID NO: 397041 - RNA, 115 nt, Homo sapiens
cagagcaaggccagggucagccugagacauuaagacacauaagcagaagaacaaagacaaguucucuggauauuccugucuaaaaaucccacugauacucuggugagauggucug

SEQ ID NO: 397042 - RNA, 80 nt, Homo sapiens
uucaguggcacaauugcagcaauaaacaaagacagaugacaauucagcuuagauguuucugcugcagucuugguccugaa

SEQ ID NO: 397043 - RNA, 74 nt, Homo sapiens
ggguagauuucuguguuuaggucacggcuauauccugaggaccuggaauagugacugacacagaguagaugcuc

SEQ ID NO: 397044 - RNA, 81 nt, Homo sapiens
gauaaccacuguuuuacucucaaauucuaugagacauucuuuuuagaguauacaugugagugagauaaugugguauuuguc

SEQ ID NO: 397045 - RNA, 74 nt, Homo sapiens
gucauguguacacguggcuguguaggaguguggcaugugugugacugggacccugugucauguguacacguggc

SEQ ID NO: 397046 - RNA, 80 nt, Homo sapiens
ucuuaguagccaucccagucaacuucagugcuucuaaagugccuuugaguacuacuaguuacugcuaugguuugcagaga

SEQ ID NO: 397047 - RNA, 68 nt, Homo sapiens
uucuuuaauucauauaagacauagugaguguuuaaacuaacacaguguuacugguaugaagugaagag

SEQ ID NO: 397048 - RNA, 68 nt, Homo sapiens
cauaaaauaaaaugagauccagucauuugcaacaacaugaauggaacuggagaucauuauguuaagug

SEQ ID NO: 397049 - RNA, 62 nt, Homo sapiens
uuauucauuaauugcuaagguuugaaagcaaccaagauguccuucaguggguuaauggauaa

SEQ ID NO: 397050 - RNA, 96 nt, Homo sapiens
gauacauaauuaaaucauccauuauguaaccacuugagauuggcuuuuucacucugcauaaugcccuugagauucauccaaguuguugcauguauc

SEQ ID NO: 397051 - RNA, 63 nt, Homo sapiens
ugguucugaaagcgaggaagcacaugaucuggguugcauuugcaccuaguguuucuugaauca

SEQ ID NO: 397052 - RNA, 55 nt, Homo sapiens
agagcgcaucgcacgcuccagguggugauguccacacuggauuguacuguguucu

SEQ ID NO: 397053 - RNA, 74 nt, Homo sapiens
auugcucaggaagaccaaacuuugguuauaauagcuugcuaaaugugacaguuaguuugguguuaugagucaau

SEQ ID NO: 397054 - RNA, 80 nt, Homo sapiens
augguaauauguugaccaugccauuuuauaugcuaaauuuuaauuguauuguaguuugcuauggcaauaaauauuauuau

SEQ ID NO: 397055 - RNA, 64 nt, Homo sapiens
agacauccuugagcagaauuucaugagcaauuauauccacccucugagaugcauugggauguuu

SEQ ID NO: 397056 - RNA, 90 nt, Homo sapiens
aggcuggucuugaacuccuggcauugugauccaccagccuuggccucccaaaguggugggauuacaggcaugagccaccacgcccagccu

SEQ ID NO: 397057 - RNA, 59 nt, Homo sapiens
gacagccagauuguccaguuuuuuauuauuaauaagaaggaauuugcaaucuguuuguc

SEQ ID NO: 397058 - RNA, 65 nt, Homo sapiens
gaaacagggggaacgaauuaucuggccccuggggggcuuucagguaagaugcuuucucuuauuuu

SEQ ID NO: 397059 - RNA, 56 nt, Homo sapiens
uacagaguauccauuugaguucauaacauaaauauguacuuggugaaugcucugua

SEQ ID NO: 397060 - RNA, 129 nt, Homo sapiens
cgggacucuuggaggaggcucaaggaaagaaaucagcaugcagaagucgggggagguggccaaccugaccagacgccucugauccugcaucuccuuugcccuaucuaaaguccuccccaacacugccug

SEQ ID NO: 397061 - RNA, 79 nt, Homo sapiens
uauauacacauaugcauguguguacaugugcacacacacacuguauguggacauguauauauauguguguguguguaua

SEQ ID NO: 397062 - RNA, 59 nt, Homo sapiens
uuuucccuagagaagugauuuuugaauugagauuuucagauuguauuuucuaggcaaaa

SEQ ID NO: 397063 - RNA, 66 nt, Homo sapiens
uuguuaagaugcagauucuggauucacuaggccuaaaacucugccggagcuucugcauuucaacaa

SEQ ID NO: 397064 - RNA, 56 nt, Homo sapiens
cuucuuuucuaauugcagcuguaaagaagaaaguccagcuguuguuaaaaaggagg

SEQ ID NO: 397065 - RNA, 56 nt, Homo sapiens
uggcaagagcaaaauguacaguuagauauuaaauuauuguaugaaaacucuugcua

SEQ ID NO: 397066 - RNA, 65 nt, Homo sapiens
ucucaugagauuaauaugacugccagggcccaguccuauguggaggaugggugucauucucgaga

SEQ ID NO: 397067 - RNA, 124 nt, Homo sapiens
uucuguucagaaaggaggaaggguacugaacacaucuuugguuagaggauaagcacauccugaaauuuucuugagaacuaaggauuugugaguugaauaacguuuuuuuuuuuuugagacagag

SEQ ID NO: 397068 - RNA, 129 nt, Homo sapiens
cuauauagacguuguacaugccggauuuauuuugaggcgaacgcaaucauuuugaaaugccuaguuuucaaaguaaaaauguguucacguuacaaaaccacuguagcaagacauuucuauuaaaaauag

SEQ ID NO: 397069 - RNA, 98 nt, Homo sapiens
gcuuagcuauccagaaaacauaaaauguggacaucggaggaaaaaagaaccauucuugggguuuccagguggccaacauuuuacuguguggcauaggc

SEQ ID NO: 397070 - RNA, 63 nt, Homo sapiens
uuuuucuuucuucccguaauaaacgaagggggcuucgcaugggauugugggaggacagagggg

SEQ ID NO: 397071 - RNA, 59 nt, Homo sapiens
uugaccucaucacuucccaaaggccccacuucccaucaccguggggaggaggaugucaa

SEQ ID NO: 397072 - RNA, 59 nt, Homo sapiens
gaauacuguccaagagugauggcaacaauuguguucuaauacuuuuuauggaaguauuc

SEQ ID NO: 397073 - RNA, 64 nt, Homo sapiens
gacauccacaugcaguuggaaacaggcaguugaacacaccuguuugaagcucaugggugagguc

SEQ ID NO: 397074 - RNA, 60 nt, Homo sapiens
aaggaugaugguaugauuaaauggaugaaauucuuuauguauuagacuugccuuauccuu

SEQ ID NO: 397075 - RNA, 63 nt, Homo sapiens
uccuacuguaaaguaaagcacaucaaggugaaguauuauauuguugcuuuacauuaucuggga

SEQ ID NO: 397076 - RNA, 64 nt, Homo sapiens
ugguguauuuagaccuuauauacauuaaauguaauuggugauauguuaggaucuaagucugcca

SEQ ID NO: 397077 - RNA, 56 nt, Homo sapiens
augaauacugcugcaaugaacauaugagugcaugugucuuuuggguagugauuuau

SEQ ID NO: 397078 - RNA, 67 nt, Homo sapiens
ucuccaccaggucccacccuugacacuuggugauuaugacaaugcaagaugagauuuuggauggaga

SEQ ID NO: 397079 - RNA, 63 nt, Homo sapiens
gagaguaagagucaaggugacccagagagaaguacacauccucucucccugacucaaauucuu

SEQ ID NO: 397080 - RNA, 101 nt, Homo sapiens
gggugccgaccugcagagcucuugccgcagguguuaugcaaacaacuggggccaccgcagugugugcauggcccugccuuguacucugagagcucggcccc

SEQ ID NO: 397081 - RNA, 75 nt, Homo sapiens
uucaguuuugguccuuucuagguauccacaucuuacccaggguugggggaaugccuagagagaaccauaacugaa

SEQ ID NO: 397082 - RNA, 77 nt, Homo sapiens
uugcuugaacccaggaggcagagguugcagugagccgagaucacgcuguugcacuccagccugggugacaagagcaa

SEQ ID NO: 397083 - RNA, 82 nt, Homo sapiens
auauagguggaaucucaaaauauaugguguuuugugucuggcuucuuucaguuagcaucauguuuucgagguucaccuaugu

SEQ ID NO: 397084 - RNA, 115 nt, Homo sapiens
acuaccuaagaucucugcuaguaaauggcugaaugaucuggacuacaauucuuuggacucuuccuucucaggagauccuguagucucacagccccauagcugugaucuagguagu

SEQ ID NO: 397085 - RNA, 73 nt, Homo sapiens
aggaaaucuuuguacacuguugguaggauuguaaauuaguacagccacuauagaaaacaguguggaguuuccu

SEQ ID NO: 397086 - RNA, 84 nt, Homo sapiens
aagaaagaaagaagccuguuuucaacagaacuagagccuauagaaauuuucauauuccacucuguuggagguaauuucuuucuu

SEQ ID NO: 397087 - RNA, 60 nt, Homo sapiens
uuuugguauccccaagguggagagggggcuccugugaccaauccccuguggauaccaaga

SEQ ID NO: 397088 - RNA, 64 nt, Homo sapiens
auugugaauagugcugcaauaaacauacauguguaugugucuuuaaaguagcaugauuuauaau

SEQ ID NO: 397089 - RNA, 83 nt, Homo sapiens
cuaaggccuugaagaaaaauugcaugucugcuucuccuccucuccgcaagaagaaagcauuagacaggcauucaaguccuuag

SEQ ID NO: 397090 - RNA, 60 nt, Homo sapiens
aagagguaggaaauggucauuuuuaguuaaauauugaaaauggugccggguuuaucucuu

SEQ ID NO: 397091 - RNA, 68 nt, Homo sapiens
ggguacaugugcacaaugugcagguuuguuacauauguauacacgugccauguugguguacugcaccc

SEQ ID NO: 397092 - RNA, 62 nt, Homo sapiens
uuuauagcagugaguauugacuaauacagaaaauugguaucagaaaugggcauugcuauaaa

SEQ ID NO: 397093 - RNA, 64 nt, Homo sapiens
auugugaauggugccacaauaaacauacgugugcaugugucuuuauagcagcaugauuuauaau

SEQ ID NO: 397094 - RNA, 79 nt, Homo sapiens
acuuccuauugucuuggacuugaaucucauugucuuaauccuuuugaugaauggguuuaaaauuaagaguguaaagagu

SEQ ID NO: 397095 - RNA, 86 nt, Homo sapiens
gaggaaauagaugagagguaacacuguucagugggcacuuuuguacuagguccaguguuggagguuuuaccaucauuauuucacuu

SEQ ID NO: 397096 - RNA, 58 nt, Homo sapiens
ggaucuggucuuauuuuuacaggaaauaaacauggucuaugagaauguuaccaggucc

SEQ ID NO: 397097 - RNA, 80 nt, Homo sapiens
gguuguauagucagagaaauauauuaaagaugcagcauugucugauucuccaguuuccuucgucuaucacuauggcaacc

SEQ ID NO: 397098 - RNA, 55 nt, Homo sapiens
gguccagaggcuucauuaagacuuucgacugaauguggagugaagguucuggacc

SEQ ID NO: 397099 - RNA, 87 nt, Homo sapiens
aaaagaagagagaguuuuuaccagagaagacgagggggaaauuuuuucccugucuuccucucuuggaucucaauuuguucuuuuuuu

SEQ ID NO: 397100 - RNA, 65 nt, Homo sapiens
aagcaauuguuugauuucauggcugccugagaucauggauaacagccaggucaaacaacaggcuu

SEQ ID NO: 397101 - RNA, 79 nt, Homo sapiens
gugcccacuguugucccugcuguccagugaaauguguucuaucacuuuuaacagccaggggacggccauauaaaggcac

SEQ ID NO: 397102 - RNA, 78 nt, Homo sapiens
augcucuuagugcauuuguucugugucaggcacuguuuuccauaguguuuguccagugccaggugcugcuguaaguau

SEQ ID NO: 397103 - RNA, 71 nt, Homo sapiens
gaacuaauagaggacugaggugaucuuuuucggcuuuuugcuuaaaauguugcggauccuuuguuuuguuu

SEQ ID NO: 397104 - RNA, 60 nt, Homo sapiens
ucuaaucuugauuuugcuaugcaaaucaggauuagauuugcauagcaaaauaggauuaga

SEQ ID NO: 397105 - RNA, 70 nt, Homo sapiens
guguaugcaugucucuguacacgugugcacauguacacauguaugugugcgugugcagggaugcaugugu

SEQ ID NO: 397106 - RNA, 112 nt, Homo sapiens
auuguauuuugcaaugugagaaugacaugagauuugggaggggcuggggcagaaugauaucauuuggaucggugucccugcccaaaucucauguugaauuguaauccucagu

SEQ ID NO: 397107 - RNA, 62 nt, Homo sapiens
gucugcugccuuuuguucagauaugcccugccccagagguggaaucuagagaggcaguaggc

SEQ ID NO: 397108 - RNA, 60 nt, Homo sapiens
gagaaugaugauuuccaauuucauccaugucccuacaaaggacaugaagucaucauuuuu

SEQ ID NO: 397109 - RNA, 65 nt, Homo sapiens
aucuucaagguuaaaguucgccugugagcauacaccuguaaucacagagguuuggccucaaaggu

SEQ ID NO: 397110 - RNA, 64 nt, Homo sapiens
cugcuaccuugcacuucauguaggccaaagcaggaaugugguccuaagacugaagugcaggcag

SEQ ID NO: 397111 - RNA, 64 nt, Homo sapiens
ggaauugccauagagacucaacagccuuuguaaaagcagagggaaguggcucuauggcaacuuc

SEQ ID NO: 397112 - RNA, 55 nt, Homo sapiens
gaggcagagcuugcaguaagccgagaucgcgccacugcacuccagacucugucuc

SEQ ID NO: 397113 - RNA, 77 nt, Homo sapiens
aggcacuacaggaucugccggcccauaccuaaaguucuggugcaggugucuucccuugguugauccuccuagugccu

SEQ ID NO: 397114 - RNA, 66 nt, Homo sapiens
uguuuauuggaugacuagaaaugucaacuuucauuagcaaagugaauguuugguccuuuauaaaca

SEQ ID NO: 397115 - RNA, 130 nt, Homo sapiens
aacuccugaccucagguuauccacccgucuuggccucccaaagugcugggaugggccaggcgccguggcucacgccuguaaucccagcacuuugggaggccaaggcaggcagaucacgaggucaggaguu

SEQ ID NO: 397116 - RNA, 82 nt, Homo sapiens
aucaguugaaaguuuuuaauugcagaacuaaggcuucucugcagaagaagaaauuuaucuguaguuaacagcuucagcuggu

SEQ ID NO: 397117 - RNA, 56 nt, Homo sapiens
ugagacgaagucucguucuguaccaggcuagagugcaguggcacaauuucggcuca

SEQ ID NO: 397118 - RNA, 67 nt, Homo sapiens
uguguauuuuccaagcauuuucaugccaguaaaacccuucugugagaacagcagcuugggacacaca

SEQ ID NO: 397119 - RNA, 91 nt, Homo sapiens
uauccuaugccuguaccaccauuguaguuuggaaaaagauaacuuguuuugauuucacaggcucacagcuggaggaauuugccuugggaug

SEQ ID NO: 397120 - RNA, 115 nt, Homo sapiens
uucuggugccuucccuugaagcagucugggguauugcacacagaaucaggguaagggauuuggcuuccccuguguguaagugcgcuaggcccauuguaagcagagagcaguggaa

SEQ ID NO: 397121 - RNA, 110 nt, Homo sapiens
cuuccacguuuuuggguaucuuuucagcaaugcugcacucuacugguaccaauuuacuguauuaguucauuuuucacacugcugauaaagacauacccgagacugggaag

SEQ ID NO: 397122 - RNA, 58 nt, Homo sapiens
agucuuagcucuguuuccucagcauuccuagcuaugcagugugcaacagauuaagacu

SEQ ID NO: 397123 - RNA, 78 nt, Homo sapiens
ucuguuguucagagaagaaagugacuauaauaggguaagcuacuaaggcacaauuuucucauacuaguagacaacaga

SEQ ID NO: 397124 - RNA, 116 nt, Homo sapiens
ucauuuuguugcuuuccacugugcuucccugaguaucuuaccaugggggaauuuauuucaaauugcaucacucacggaagacaauucuagggaaaaaaaugucaggucaacacuga

SEQ ID NO: 397125 - RNA, 80 nt, Homo sapiens
guccauuuuacugaugagaaaacuaaggcacaaagaaauuaaggaacuugccugagaucauacuguuaguaaguaaggac

SEQ ID NO: 397126 - RNA, 85 nt, Homo sapiens
agaaaugcuugucaaugggugagugcagagacauccuggggucuggucccaguucugcccuuaauguauuggacaauucauuucu

SEQ ID NO: 397127 - RNA, 77 nt, Homo sapiens
ucgcuugaaccugcgaggcggagguugcagugagccgagauugcgccauugcaauccagccugggcaacaagaguga

SEQ ID NO: 397128 - RNA, 73 nt, Homo sapiens
uuuuuauagcuauuguuaauggaacugccuucuugauuuccuucucaagcaguucauuaaugguguauagaaa

SEQ ID NO: 397129 - RNA, 55 nt, Homo sapiens
augagauaggaacaaacuuacaggaugcuuaucuggaccuuguguucuaucucau

SEQ ID NO: 397130 - RNA, 80 nt, Homo sapiens
ggggagcuugguuauucaugcacccaucuuaugacaagaagaccaugcaugguaguaaccuacauuugagagcuuacccc

SEQ ID NO: 397131 - RNA, 74 nt, Homo sapiens
gagguuaugauuuguuucaggaguuuucuaggaguugagguucccaucagaaaacucagaggccaauagaccuu

SEQ ID NO: 397132 - RNA, 74 nt, Homo sapiens
acugcaggcucaugacaaaauaaauggucucugucuuacgccgcuaaguuuagaguguuuuguuaggcagcagu

SEQ ID NO: 397133 - RNA, 71 nt, Homo sapiens
guuuugauagauuuuuauucaugacaaaauaagaaaaauccuaauuugucacucuuggagguuguuaaaac

SEQ ID NO: 397134 - RNA, 58 nt, Homo sapiens
ucuggcgguuugcggccaaucuuggguuuuccuugucuuguagcagcauaaucccaga

SEQ ID NO: 397135 - RNA, 65 nt, Homo sapiens
ccauauggcuaugggaacugggaguguggggcuccaagcuccauggggaccccaggccaggaugg

SEQ ID NO: 397136 - RNA, 98 nt, Homo sapiens
gaggcaggagaaucgcuugaaccccggaggcggagguugcagugagcugaauuucaccauugcacuccagccugggcgacagagugagaauccgucuc

SEQ ID NO: 397137 - RNA, 69 nt, Homo sapiens
cuuucagcagugccccacucuacugguaccaauuuacuguauuagucuguuuuuacauugcugauaaag

SEQ ID NO: 397138 - RNA, 59 nt, Homo sapiens
ggccuuugaaggguauaggaagugcugggggcugguuccuacugcccauuaaaauggcu

SEQ ID NO: 397139 - RNA, 82 nt, Homo sapiens
auucuuuuguucucuauuguacauguuauagauuuuuaaguugucuggaagucaagaugcauaugcaaguauacaaaagggu

SEQ ID NO: 397140 - RNA, 60 nt, Homo sapiens
agucuccaccucuggggcucaagcgauucucccaccucauccucccuaguagcugggacu

SEQ ID NO: 397141 - RNA, 55 nt, Homo sapiens
gacggaaaguaggaagugaauuugcugugugauugugaacugguuacuuucuguc

SEQ ID NO: 397142 - RNA, 79 nt, Homo sapiens
aaaguucaagaguucaguuuugaaauguuaauuccuuuuugggaaauugacauuuguagaauaaugguuuaggaauuuu

SEQ ID NO: 397143 - RNA, 59 nt, Homo sapiens
gguucaagcaccaggauccaucaguuuugcuggaccaucugugagacugguuuugaacu

SEQ ID NO: 397144 - RNA, 61 nt, Homo sapiens
gaaagaaucaacuaugucucuggcaugcacaucaaugaugagaacaguguuguauuuuuuc

SEQ ID NO: 397145 - RNA, 65 nt, Homo sapiens
gugaccuaauuacuuccuuaaaggugucacuucucaauacuauugcaucggugauuagguuucac

SEQ ID NO: 397146 - RNA, 74 nt, Homo sapiens
aacuaccuggucauggugauuugcgccuucuauuugggaggaugaggugggagaaucacuugagcccaggaguu

SEQ ID NO: 397147 - RNA, 69 nt, Homo sapiens
ugaagccacucaguuugugguacuuuguugcuguggccccaagaaaguaccacaagccugagguuuuca

SEQ ID NO: 397148 - RNA, 89 nt, Homo sapiens
uaguuuauaccaaauacauuaauuaggaaaauguuauaaaaacuuguuagauguuguuuagccuuugauguuagaaagguauaaaucua

SEQ ID NO: 397149 - RNA, 130 nt, Homo sapiens
cuuucuuugaagcaucauauauuuuagguugguguaacaguaauugcaguuuuugccauugaaaguaauggcaaaaaucacaaguaccuuuguaccaacauaacagauaagaaaauucaucagaagaaag

SEQ ID NO: 397150 - RNA, 65 nt, Homo sapiens
uugcaugauauugcagaauguuggugccacuacuaaacugguacuauaguaaauaauacauguaa

SEQ ID NO: 397151 - RNA, 58 nt, Homo sapiens
gccugggaggucgaggcuguggugagccaucauaacacuacugcacuccaaccuaggc

SEQ ID NO: 397152 - RNA, 63 nt, Homo sapiens
aaagcugacuagcauuuagugcuguaaacauuuucaaaagcauaaagcuagaaccuuagcuuu

SEQ ID NO: 397153 - RNA, 75 nt, Homo sapiens
uguuuuuugacuuuuuaacaauagccauucuaacuaguaucuuggaaugguaucuuguugggguuucaauucgca

SEQ ID NO: 397154 - RNA, 130 nt, Homo sapiens
gccuaugacaucuggguugguuccaagucuuugcuauugugaauggugccgcaauaaacauacaugugcaugugucuuuauagcagcaugauuuauaauccuuuggguauauacccaguagugggauggc

SEQ ID NO: 397155 - RNA, 91 nt, Homo sapiens
uggcugggucaaaugguauuucuaguucuagauccuugaggaaucaccacacggccuuccacaauggcugaacuagauuacagucccacca

SEQ ID NO: 397156 - RNA, 82 nt, Homo sapiens
uuuucugcuguuaauuugucucuuucagguuauuucauagaugcaguuaucaaaaccucagagaguagagcaauagagaaaa

SEQ ID NO: 397157 - RNA, 64 nt, Homo sapiens
uucagucugccaguauuuuauugaggauuuucacauggauauucauuagggauauuggccugaa

SEQ ID NO: 397158 - RNA, 98 nt, Homo sapiens
ugggggaggaucgucugagcccaggaguuugaggcugcagugagcuacaaucacaccccugcacucaagccuggguuacagagugauaaccugucuca

SEQ ID NO: 397159 - RNA, 88 nt, Homo sapiens
ggaacacuucugucuagauauaaaauuacuuugguucagcaaauaaaauaacuuugguucauguaauuuugugucuaugacuuguucc

SEQ ID NO: 397160 - RNA, 70 nt, Homo sapiens
aagucuuugcuauugugaauagugccacaauaaacauacgugugcauaugucuuuauagcagcaugauuu

SEQ ID NO: 397161 - RNA, 88 nt, Homo sapiens
ggagaauugcuugaauccacgaggcggagguugcagugagcugagaucaagccacuguacuccagccugggcaacagagcaagacucc

SEQ ID NO: 397162 - RNA, 63 nt, Homo sapiens
ccagggcaaucaguagauguucuuucauacaauacagcuuagggagcaucauuauuguuuugg

SEQ ID NO: 397163 - RNA, 94 nt, Homo sapiens
uugguauuagggugauacuggcuuuauagaaugauuuagggaggauuccuuuuuuaucuauccuguagaguagugucaauagaauugguaccaa

SEQ ID NO: 397164 - RNA, 93 nt, Homo sapiens
ccauguacccagaaauauauuuagcaaagcaauuuacaccaucacuggcugauggauugugguuuucuaaguuggguuuuaagauguaaaugg

SEQ ID NO: 397165 - RNA, 56 nt, Homo sapiens
cacacauauccuuagaagaauaauuuucuccaaauugaacuguaagggucugugug

SEQ ID NO: 397166 - RNA, 56 nt, Homo sapiens
ucaugacacagcauacugacuucaaguuuugaaagaacccagugggcuggucaugg

SEQ ID NO: 397167 - RNA, 58 nt, Homo sapiens
uccagcucacagagcaaauuuagccugcuugccugauuuguuggccugugagcuagga

SEQ ID NO: 397168 - RNA, 60 nt, Homo sapiens
uccauguggccagacacuggcauaagaggcugaaaugccccagugguuggaaacuauggg

SEQ ID NO: 397169 - RNA, 128 nt, Homo sapiens
cacguguguauguguacauauguguauaugugugcaugagcaugucugugcaugucuauauacauguauaugaacgugugcauauaagcagguguaugugugugcauguguguuuauauguguaugug

SEQ ID NO: 397170 - RNA, 58 nt, Homo sapiens
ucuucauucucgccuuugucgucagcauuuauggagcuaggcacugugugagugagga

SEQ ID NO: 397171 - RNA, 126 nt, Homo sapiens
uacagcugcauaaagugaacugcuuuaccuguaugguuaguucccucauucuugacuucugugguucccacagaagagguggguggacuagcaggaggacuggcaguaaagcuugugcacccugua

SEQ ID NO: 397172 - RNA, 58 nt, Homo sapiens
uccauuuuaagagugccauuucacaaaguccauggaagagguaugacuaugaagugga

SEQ ID NO: 397173 - RNA, 58 nt, Homo sapiens
ccucagcuccuaucucuguauggccugguuuuuccuagguuaugauuguagagcgagg

SEQ ID NO: 397174 - RNA, 55 nt, Homo sapiens
aggccuuugguuuccccagcugugaaacucccacaugggguagaagagaaggcuu

SEQ ID NO: 397175 - RNA, 93 nt, Homo sapiens
cucucaucucugcuaccuuaucuccauugaaauggacauaaucaucucaaggugaaugugucaagaaaugugagguggagcugggauagagag

SEQ ID NO: 397176 - RNA, 55 nt, Homo sapiens
uugagauggagucuugcucucucgcccaggcuggagggcaguggcgcuaucucag

SEQ ID NO: 397177 - RNA, 76 nt, Homo sapiens
ucuuuuacuguuggacuuacuuggcagauugguuuuugaauagaagcaaucuugggaggucugagacaggauggga

SEQ ID NO: 397178 - RNA, 68 nt, Homo sapiens
cucucucucuagugaguucccagaugaugccagucugcugaucaaugggcuacacauugagugaagag

SEQ ID NO: 397179 - RNA, 64 nt, Homo sapiens
agaauuuuuauagcuauauugucgaguguguagaaagcuuuugauaacagcauaugaagauucu

SEQ ID NO: 397180 - RNA, 56 nt, Homo sapiens
gacaagaaaagauuguuccuguuuucuccuuuuaggaaguaacuaucuuuucuguc

SEQ ID NO: 397181 - RNA, 72 nt, Homo sapiens
gcuucauuuggguaguugguaacaugcauaugcuugggguggaugacugagacuaacuuacuuuccagaagc

SEQ ID NO: 397182 - RNA, 58 nt, Homo sapiens
cacuucacugugcuuaaauucugcugaauccucaguguuuacuagcacaugugaagug

SEQ ID NO: 397183 - RNA, 55 nt, Homo sapiens
guacgaguacagauuuguuauguaaguaaacuugcgucauggagauguguuguac

SEQ ID NO: 397184 - RNA, 75 nt, Homo sapiens
accuccuuuugucauauuaccugaguugguuuucugguuucuucucauuuagguagucucugucagagggaaggu

SEQ ID NO: 397185 - RNA, 83 nt, Homo sapiens
cacgcaggaggcagugcagugcagugguuaggagccaggcagcuuggguuugcauccuggcucugccacuuacugccugugug

SEQ ID NO: 397186 - RNA, 56 nt, Homo sapiens
gguggcuuggguggggguucuugagguagagcacaugacccugaccuaagccaauc

SEQ ID NO: 397187 - RNA, 75 nt, Homo sapiens
gacaugaauuacuuggaauucuuuugcaaaggagauugucuauuucuuuuugagucaguuucgguaguauauguc

SEQ ID NO: 397188 - RNA, 100 nt, Homo sapiens
gagguaggagaaucgcuugaacccaggaggcggagguugcagugagucgagaucuugccauugcacuccagccucggcaacaagagcgaaacuccaucuc

SEQ ID NO: 397189 - RNA, 91 nt, Homo sapiens
gagcagaaaucaguuaucguacauacuucacagacuuuaaaguuuuuugcacuuuacuccucagugauaugugaacauggugucacugcuc

SEQ ID NO: 397190 - RNA, 57 nt, Homo sapiens
ggguuuuucagacugagugccacugaauaauucuuugucacuggggcuggauaauuc

SEQ ID NO: 397191 - RNA, 68 nt, Homo sapiens
gcucuauugcccaggcuggagugcaguggcacuaucucagcugacugcaacgccuccuggguucaagc

SEQ ID NO: 397192 - RNA, 81 nt, Homo sapiens
uuccaacuguuauucucaauaauucguguuucuuugguacaaagaguacuguaaaaugcaguugguggggauaugcuggag

SEQ ID NO: 397193 - RNA, 90 nt, Homo sapiens
gcacagaggggaaggggggcaccugcaugcccggcugggucucuguagacaguggaucaugcgaggccuccccucuccuugacccugugu

SEQ ID NO: 397194 - RNA, 87 nt, Homo sapiens
cucaaaugacuguaucccagcuuucuuccuggugucugaggcccacaaagucucaguaccugagagugggcagauugcagcuuugag

SEQ ID NO: 397195 - RNA, 58 nt, Homo sapiens
guuagagcuuuuuauaaucuugcuuauugcuuauugcaggucaugaagauguucuaau

SEQ ID NO: 397196 - RNA, 61 nt, Homo sapiens
ucagagcucugaccuugaggagagcagugaccccugaucccugacagggucugagcuuuga

SEQ ID NO: 397197 - RNA, 64 nt, Homo sapiens
uucaguuugccaguauuuuacugaggauuuuugcauugauauucaucagggauacuggccugaa

SEQ ID NO: 397198 - RNA, 58 nt, Homo sapiens
gaccucugucuggacauccagguauuuccauacauccugugaaaucuaggcagagguu

SEQ ID NO: 397199 - RNA, 85 nt, Homo sapiens
uauuggguucauuauuggaauuaaccuggugcuggauauuuucaaauuguaucuagugcagcugauuuuaacaauaacuacugug

SEQ ID NO: 397200 - RNA, 65 nt, Homo sapiens
gccccaugguugaacugagcccagauacagugaacaaggagagggguuacacaaccuaguggggc

SEQ ID NO: 397201 - RNA, 87 nt, Homo sapiens
uaugccccccuccgacuggacuguaauaccaugaggacagagacagugucuuucucauucauuguugcaguccuaaggccuagcaua

SEQ ID NO: 397202 - RNA, 130 nt, Homo sapiens
agggacguuuaagucugcagaagcucucugcugccuuuuguucagauaugccuugcccccagagguggaaucuagagaggcaguaggccuuacgaagcugcugugggcuccaccuaguuugagcuucccu

SEQ ID NO: 397203 - RNA, 67 nt, Homo sapiens
gccuguauccgugcucucuaauaguguccacuaaccacacguggcuauugagcacaugaaacauggc

SEQ ID NO: 397204 - RNA, 94 nt, Homo sapiens
uaauauguugaguagaaggggugaaagugggcauccuugucuuauucuaguucuuaggaggauugcuuucaucuuuuccccauucaauauguug

SEQ ID NO: 397205 - RNA, 56 nt, Homo sapiens
ggcccucugccuuuucaugugggauggcugccuuccacuagugagggcaaagggcc

SEQ ID NO: 397206 - RNA, 129 nt, Homo sapiens
cuucagccucccaaagugcugggauuacaggcaugagccacugugccuggcccaauuuuuuaaaugauacaaaaaguagcuggaugcaguggcacauaccuguagucccagcuacuugggaggcugagg

SEQ ID NO: 397207 - RNA, 66 nt, Homo sapiens
uugaaugggaggcggagguugcagugaacgaagauugcgccacugcacuccagccucccgucucaa

SEQ ID NO: 397208 - RNA, 66 nt, Homo sapiens
cuaaaggaaucugagccccugauaucacugagucacuaaaccaaugccaguggccagcuccuuuag

SEQ ID NO: 397209 - RNA, 55 nt, Homo sapiens
cagguaguguguagcacagcaguucucaucucagacugcccacuagaacuaccug

SEQ ID NO: 397210 - RNA, 98 nt, Homo sapiens
gcaguauugguugcuuacccuugugauugcacggcugccuggcugcugaggcucaccgcugcugcccugcaucacgagaguauuguaccauauauugc

SEQ ID NO: 397211 - RNA, 61 nt, Homo sapiens
guuccaguauuugggcaagcgcaucguaacggaaaccagugccuugccugugugcugcaac

SEQ ID NO: 397212 - RNA, 69 nt, Homo sapiens
gagacucuccuucaguccaguggguuuugaggcagagccucagaauacagaacugaggaaucaugucuc

SEQ ID NO: 397213 - RNA, 129 nt, Homo sapiens
ggauauauacccacaguaggauugcuggaucauaugauagcucaauuuuuaguuuuuuaaggaaacucuaaauuguucuucauagugauuguacuaauuuacauuccuaauaacuguguaugaaggucc

SEQ ID NO: 397214 - RNA, 55 nt, Homo sapiens
gucacugugaggaggggccagggggccacgucccuuagcuccagacccacaugac

SEQ ID NO: 397215 - RNA, 78 nt, Homo sapiens
aggaaggagccggugugauggggcuucucucugcucccagcagacgcagacccuccccacacuggccuguccgcuccu

SEQ ID NO: 397216 - RNA, 117 nt, Homo sapiens
ucuguucccccacuaggcuuugcugugagugccuggagggcagggacugggugaaccccggucaucucugcaccuccaggccugacacugggcagguggccaguaacuuggggcaga

SEQ ID NO: 397217 - RNA, 78 nt, Homo sapiens
uuuaacaugaaagaauuaaauaaagucaagcaugagauggauuuugaugcugaguggcuauuugaaaaucaugaugag

SEQ ID NO: 397218 - RNA, 59 nt, Homo sapiens
agcagcaucgggaaguuggccaugaucuuugucuuggggcucaucuauuuggugcugcu

SEQ ID NO: 397219 - RNA, 66 nt, Homo sapiens
uaacauggcuguguuccaauaaaacuucacaaaaaacggcaggauuugguccacaugucauaguua

SEQ ID NO: 397220 - RNA, 74 nt, Homo sapiens
ggguccuugcgugaaugaaaccuagcacagugaggcaacucccuugagggaaacauucacaucauggcgggccu

SEQ ID NO: 397221 - RNA, 76 nt, Homo sapiens
cuggcauguguauucauguugaauagacaguucuauucaauagaacuguccauucagcaugaacaagauugaccag

SEQ ID NO: 397222 - RNA, 68 nt, Homo sapiens
uguguugagaacuaaugauguacuaggcacuauuuugugugcuuuagauagauuuagucuuuacaaca

SEQ ID NO: 397223 - RNA, 86 nt, Homo sapiens
gaggcacugcaaagucgaaacugcaguuuaggcuguaauuaaaucauccaggagacuaggcuucagguuugcuuugcagaaaucuc

SEQ ID NO: 397224 - RNA, 66 nt, Homo sapiens
ccacaaagugcaguccuucucacucuuccuuucuuuuucuagagucaguggagccucacucugugg

SEQ ID NO: 397225 - RNA, 127 nt, Homo sapiens
ggguggaccauggaugguuuaggaaaaggcaacauuugagugggaaaacagggauagaaguucucacuuugggccauggcuuuuccacgaggguggggcuucaucagggaccugcuguugucugccu

SEQ ID NO: 397226 - RNA, 64 nt, Homo sapiens
uucagucugccaguauuuuauugaggauuugugcaucgauguucaucagggauauuggccugaa

SEQ ID NO: 397227 - RNA, 88 nt, Homo sapiens
ggagaaucacuugagccugggaggcagagguugcagugagcuaagaucgcaccacugcacuccuccuugggugacagagugagauucc

SEQ ID NO: 397228 - RNA, 64 nt, Homo sapiens
uguccucuuccaaguugcagauggccaucuucucauuguaucaucacauagaggaaagaggaca

SEQ ID NO: 397229 - RNA, 67 nt, Homo sapiens
aggcgggguggaucauuugaggucaggaguucaaaaccagcuuggcuaucauggugaaacccugucu

SEQ ID NO: 397230 - RNA, 67 nt, Homo sapiens
uuaugcuauauguauugagggguggaaacuggauuagauuaacugcccuuaucaguggcaaguauaa

SEQ ID NO: 397231 - RNA, 88 nt, Homo sapiens
acagcacaggggcaguagaaugaguuccuuugagccugagaggcauagagaagucucaaggaacagggacaacucagccaugugcugu

SEQ ID NO: 397232 - RNA, 60 nt, Homo sapiens
gcggguggguuugggauaggguggugaggacaguaaguacccugcuaaacagcccccugc

SEQ ID NO: 397233 - RNA, 63 nt, Homo sapiens
cuuacccgacaucaaaaaguucauacuggugagaaaccuuaugaauguaaagaaugugggaag

SEQ ID NO: 397234 - RNA, 63 nt, Homo sapiens
uuuauuuggcuuuugugauacguaauuguaguugaaauaauuauugcaucagaagccaauaaa

SEQ ID NO: 397235 - RNA, 73 nt, Homo sapiens
aucucuuguugggagugucucuggacugcagccugagcuagcuggcagacuuccaugagguccccugagaggu

SEQ ID NO: 397236 - RNA, 61 nt, Homo sapiens
ugguguagguuucgccucugagucuuagggcccuagagccucagcaguggauuuaccacca

SEQ ID NO: 397237 - RNA, 80 nt, Homo sapiens
cauggcuuuuuucuugggcacucuuuugcugucucugagugaagccagcugucaugagcugcccaguggagagggccaug

SEQ ID NO: 397238 - RNA, 120 nt, Homo sapiens
ggcuucuaguugacagcuggaaauggaggcauuucuggcagagaaacaggucuaaggaggcagcgccagcuuccucagguccugucucuacaaggccccauugcuguaacuagccaagcc

SEQ ID NO: 397239 - RNA, 89 nt, Homo sapiens
ucugugcaauaggucugaguccucagguuucaucaaagaagauguacaacaaugaggcacucuagacuuauucaagaguagagcacaga

SEQ ID NO: 397240 - RNA, 57 nt, Homo sapiens
aaaggcauguugauagguagauguaucuauguauauaaauaugauuaacgugucuuu

SEQ ID NO: 397241 - RNA, 69 nt, Homo sapiens
ccugaugauggucaggaugccaccuguaugugcaugcuggcguuacucuccaucagcuucugucucagg

SEQ ID NO: 397242 - RNA, 64 nt, Homo sapiens
gauuuuauguuuguucccugccaaagggacuaaaauauccccuugagagaucagccauaaaauu

SEQ ID NO: 397243 - RNA, 89 nt, Homo sapiens
guucagguggcuauguagugggugagauccucucuuauauggguccagggguggccugugagaggagggaccucuccugccaauugaau

SEQ ID NO: 397244 - RNA, 79 nt, Homo sapiens
uaucacuggaaguuaaaugacucuuucugaaaagcagccagacgcuucagauggagggauguuuggcuccugagugaua

SEQ ID NO: 397245 - RNA, 70 nt, Homo sapiens
agcacauauugaauauuuaauaggcaucaucaacuuuugucuaugaucacuguggaaauucagcugugcu

SEQ ID NO: 397246 - RNA, 98 nt, Homo sapiens
gacaagucccagcucccuuugggccaugguuuguguauaugucaagcaggaguaaugcuuuguaugcagcccaucucacagggaauuguggagcuguu

SEQ ID NO: 397247 - RNA, 68 nt, Homo sapiens
cugaccccaugccagggcacugcugggcagacuggcuucuccugcccugcccaguggcuuggggucag

SEQ ID NO: 397248 - RNA, 90 nt, Homo sapiens
uuucagguaucuuuauagcagugucccacuccuugguaccaauuuucuguauuaggccauucuugcacugccauaaaaaaauaccugaga

SEQ ID NO: 397249 - RNA, 69 nt, Homo sapiens
aaguaaaagcuagagaagcugcugucaacuuuuuacuuaaaucugacaguauaucucugccuuggacuu

SEQ ID NO: 397250 - RNA, 61 nt, Homo sapiens
gcuuauauuuguuucuaguggcagcaaguucuguuuugcucaccugagaagaauagagggc

SEQ ID NO: 397251 - RNA, 67 nt, Homo sapiens
uugaggaggcagucuguccauucucagagcucaaacacagugcugggagaaccacugcucucuucag

SEQ ID NO: 397252 - RNA, 67 nt, Homo sapiens
agaagggaaauuaauuaugccagaguuuauggucaagguauuuugugcugcaauuaauuucccaucu

SEQ ID NO: 397253 - RNA, 130 nt, Homo sapiens
uuuuaccaauucacuauugaugggcauuuagauuauuuccaaagugugcuauuacaaauaaugcugcaauuaacacauuauauguguaugugcauaccuguguguauuuucaguaguaacuguguugaaa

SEQ ID NO: 397254 - RNA, 57 nt, Homo sapiens
gccucucugugccuguuuccuucucuaaaauggggaggauaguaaugauagagaggc

SEQ ID NO: 397255 - RNA, 73 nt, Homo sapiens
gcacaguucaggcuuuuccacacauggguucaggauuccaaagagcugcaaaagugggcaagccucauugugc

SEQ ID NO: 397256 - RNA, 70 nt, Homo sapiens
uguuauguuuuagagguuucaaaauuauucaaaugcuuuuguauguuuugaauauuuucauggcaugaca

SEQ ID NO: 397257 - RNA, 56 nt, Homo sapiens
cccgggagguggagguugcaaugagccaaaaucaugccauugcacaccagccuggg

SEQ ID NO: 397258 - RNA, 67 nt, Homo sapiens
gguggacuuuuuggauuuugguggcaacucauaccacauugggaugugcuacuucaauccauuuacu

SEQ ID NO: 397259 - RNA, 83 nt, Homo sapiens
gguaaaugaaauaaggcagucacuaaauagugagaaaagucaccuauuuacucauguucagaugacucccggguuucagaauc

SEQ ID NO: 397260 - RNA, 88 nt, Homo sapiens
gccacccauuugugcacagaugaggagaggucucaugaagcuucagugcagucugggaccuuagcucauuuguaacaaguuguuuggc

SEQ ID NO: 397261 - RNA, 56 nt, Homo sapiens
uggcgagaaaccauaugcuuucuugcuuagaaaagaaggcaagauguuuccugcca

SEQ ID NO: 397262 - RNA, 56 nt, Homo sapiens
caagagggugugaacuccccuacguuugcagccccgucaagcaccacacucucuug

SEQ ID NO: 397263 - RNA, 57 nt, Homo sapiens
ggacauuuugucucaguuucauuaagucuucuuauuugaacacuggacugagugucc

SEQ ID NO: 397264 - RNA, 79 nt, Homo sapiens
agaacacauuugcagagccccacacugggcuccaggcuccuagaagcagcgggagccugcgugggggcuuugcaguucu

SEQ ID NO: 397265 - RNA, 77 nt, Homo sapiens
gauuuucaauccuguugguuaaaucagguuuuaaacauccuuagacccaaaucuggccauacaaggcagagaaaauc

SEQ ID NO: 397266 - RNA, 85 nt, Homo sapiens
cuuucauaagagauaaagaggcaagugggagacagcauuuggagcaauucuucacaugccucccauuguccugcauuuuagaggg

SEQ ID NO: 397267 - RNA, 94 nt, Homo sapiens
cauuuguagauugucuuuggaaaaaaugucuguucaaguccuuugccuacuuuuagauuuuuaaugggcacuuccagaagaggagacccaaaug

SEQ ID NO: 397268 - RNA, 66 nt, Homo sapiens
caguaugucuuuugcuugcaaauagauugcucauugccaacugcuuccaagaaagagauagggcug

SEQ ID NO: 397269 - RNA, 85 nt, Homo sapiens
agcucuagguagcauaggguuucauucuuuuccuccacuuuaauccagaggcagagcaaugacaugcuaugugguccaaaaagcu

SEQ ID NO: 397270 - RNA, 55 nt, Homo sapiens
uugagguggugucuugcucuguuacccaggcuggagugcagugucgccaucucag

SEQ ID NO: 397271 - RNA, 129 nt, Homo sapiens
agaucgcaccacugcacuucagccugggugacacagcaagacuccgucucuaaaugaaugaaugaaugaaugaaugaaugaaacggagucuugcucugucacccaggcuggagugcaguggugcaaucu

SEQ ID NO: 397272 - RNA, 75 nt, Homo sapiens
uuuugacuuugacagacacaauugauccaugaaauuauaugucuuugaggguuuguuuguuuguuugagacagga

SEQ ID NO: 397273 - RNA, 59 nt, Homo sapiens
aacagagaauaacaagcguugggaaggacauagagaaauuggagcucuuguucucuguu

SEQ ID NO: 397274 - RNA, 90 nt, Homo sapiens
gacacagugagaauugcucaaaucaguacuugagugguucaauguuaaggugaauuucagguacaauuugagccagagguucauaguguc

SEQ ID NO: 397275 - RNA, 79 nt, Homo sapiens
gguuaacagucacugacaagagagaagaacuuugauaauugcucuagguuuuuuucugauugcucugaaauauuuagcu

SEQ ID NO: 397276 - RNA, 85 nt, Homo sapiens
agaaguucuaagcaauuggcuuuggaacuccaaggacuuaacaaauaaaucacugggagaccaaagccaucuugguuaguguucu

SEQ ID NO: 397277 - RNA, 79 nt, Homo sapiens
aggcuggagugcaguagagugaucuuggcucacugaaaccuuugccucccguguucaaaugauucuccugccucagccu

SEQ ID NO: 397278 - RNA, 61 nt, Homo sapiens
gcugagagggaugcuuaauaguguuacacaggaagugacacagugggggauccuuuucagc

SEQ ID NO: 397279 - RNA, 93 nt, Homo sapiens
gcagguguccuuaaguagggagaggcaggcaaccaccugggaagauguuaaaugcacacauccccggguucugucugcccuuggagauucugc

SEQ ID NO: 397280 - RNA, 66 nt, Homo sapiens
uuuagaguaguuuauuaugcuaagggccugggaaacacuuuagauucaguaaaaaaacuaccuaga

SEQ ID NO: 397281 - RNA, 129 nt, Homo sapiens
ugggacuacaagccugagacacugugcuuagccaacucaccaugucuuuuaaacauucaacuuucaguuaaagggaacacucaagacauguuaugaggcugggcauaguggcucacgccuguaauccca

SEQ ID NO: 397282 - RNA, 58 nt, Homo sapiens
agaaguacaaaguaauuuuuauuuaugccccuguauagguagaguguuuuguucuucu

SEQ ID NO: 397283 - RNA, 74 nt, Homo sapiens
ugcucuccugcugagguggagauugcagugagcugagaucgcaccauugcacuccagccugggcaacaagagca

SEQ ID NO: 397284 - RNA, 60 nt, Homo sapiens
cuagguaggcuugugucuagugggucauugaguguuauccucuagacauagguuuaaugg

SEQ ID NO: 397285 - RNA, 82 nt, Homo sapiens
aaaugagugagaauaugugaaguuuaucuuuuuaugccuagcuuauuucacuuagcauaaugacuuccaguuccacucauuu

SEQ ID NO: 397286 - RNA, 89 nt, Homo sapiens
cagagagaugugggauuuugccaggugccaaguaugucuaugccaguuguacauuuuggcacugggaaaaugaccacggaaugacucug

SEQ ID NO: 397287 - RNA, 91 nt, Homo sapiens
uuucucguuacagugacagaucugaguaguugcacagagacuggauagcccacgauguguaaauagcuacggaucugauccuuuacagaaa

SEQ ID NO: 397288 - RNA, 57 nt, Homo sapiens
agcuucuccauuagcaggugcugcuucaccuugcauuuuuauguuauggagacagcu

SEQ ID NO: 397289 - RNA, 73 nt, Homo sapiens
guuuguuuugagaugagucucgcucugucacccaugcuggagugcaguggcacgaucucggcucacugcaaac

SEQ ID NO: 397290 - RNA, 103 nt, Homo sapiens
ggaguuaagucuggguaaacccguuguaaguuggaaaugucuuagaaugcaccuuugaccuagguauuuucaacuuagaauggguuuaucaggauguaacucc

SEQ ID NO: 397291 - RNA, 77 nt, Homo sapiens
ggaagaguaguuuuguuuaaaaauuuugggacagcagaaagauauguaaguucuggcuuauaaacgugacuucuucc

SEQ ID NO: 397292 - RNA, 125 nt, Homo sapiens
gccuuccaaagugcugggauuacaggcaugagccacugcacuuauccuccaauguuuuaauaaauaauaaagcauuuaggccggaugcagugucucaugccuguaaucccagcacuuugggaggc

SEQ ID NO: 397293 - RNA, 75 nt, Homo sapiens
gaacuauaguucccauaauccccacguauuguaggagggaaccagugggaugugacuggaucauggggacgguuc

SEQ ID NO: 397294 - RNA, 83 nt, Homo sapiens
uugcuauuagguuggugcaaaaguacucgugguuuuugccauuaaaaguuauggcaguuacuuuuccaccaaccuaauaauaa

SEQ ID NO: 397295 - RNA, 85 nt, Homo sapiens
acaaauaagcugccacuguauucucugacagguucauugagcaggcuuguauguuguuugucagagaagcaggguuccauuuugu

SEQ ID NO: 397296 - RNA, 67 nt, Homo sapiens
auuaugugaucaguuucuggagauacguaacuaugcagauacuauauucaagagacugucacuuaau

SEQ ID NO: 397297 - RNA, 59 nt, Homo sapiens
aaaccucugccuagauuucagaggauacauggaaaugccugauguccaggcagagguuu

SEQ ID NO: 397298 - RNA, 81 nt, Homo sapiens
aaaaucuggcuaagugcuugagugugcugcacuauguguuugcucguguguaaaguggcaugcuuacaacuggccuguuuu

SEQ ID NO: 397299 - RNA, 62 nt, Homo sapiens
aucaguuaacugucucaggccaugggcgcuauugacauugauaguuggcuuugagaacuggu

SEQ ID NO: 397300 - RNA, 60 nt, Homo sapiens
gagcuagguuuugaauccagaccauauacucauggccauuaggacuucaaacaucagcuc

SEQ ID NO: 397301 - RNA, 81 nt, Homo sapiens
gccauggaggacuuucuuggcaaggcuacuuaaaauagcagucccucaaauuuguuacuuugcacuugcuccuucuauggc

SEQ ID NO: 397302 - RNA, 87 nt, Homo sapiens
uuguuguuguuauaucagugucuuacuguuuuuccacuuuuuuguguguagucagagaaacaaaguacauugauguuuguuuaaagg

SEQ ID NO: 397303 - RNA, 64 nt, Homo sapiens
gcuguagguguuaucagccuauuuaauuuguuauaaucuuauagauuaagugugauaucucagu

SEQ ID NO: 397304 - RNA, 56 nt, Homo sapiens
cugggaggacuugggcugagagcugguggaccagaucuuggguugaauucucccag

SEQ ID NO: 397305 - RNA, 95 nt, Homo sapiens
aguuuacuauaccuuugguuaauccugccuuauuucaguaaagaaaauuuguacuggaauaacuuguagugguuucuaagaauaaauaguaagcu

SEQ ID NO: 397306 - RNA, 107 nt, Homo sapiens
gggucaggagcucacaucccuuucucuggcuagggggaagggccuauccucuuugaugauaacuuccugccuaguugauaggaagcgguuccugugcuccuugaccc

SEQ ID NO: 397307 - RNA, 88 nt, Homo sapiens
aacagccauccguuaaaucuaggcucuguguggacuugagguuuaucccagaucaucuugagcuuaggaauuuggauuugagucuguu

SEQ ID NO: 397308 - RNA, 61 nt, Homo sapiens
gggugcucaucagcauugaccacacagguucugcuuaugugacuaguggugaaugacgccc

SEQ ID NO: 397309 - RNA, 78 nt, Homo sapiens
gcagucacugagauugguauuaaugacaucacuauuaugaaugcugcgauuucaucuaguaucuauucaguuaacugc

SEQ ID NO: 397310 - RNA, 122 nt, Homo sapiens
gaauccuugucucucacauaggauuccagagcacugauacuggguucugaguguuuguccuucacauaggauuccagaacacugcuccgagagucugaauguuugucccucacauaggauuc

SEQ ID NO: 397311 - RNA, 72 nt, Homo sapiens
gcuugagcccaggagguugaggcugcagugagcuguguucacaauacugcacuccagccugggugacagagc

SEQ ID NO: 397312 - RNA, 65 nt, Homo sapiens
aaaauguuagcacuaagaauauauuuuuauauuuuaacuuaggagcuuucuuguguugauauuuu

SEQ ID NO: 397313 - RNA, 129 nt, Homo sapiens
auuguggaugcgugcaccugcgcuuccugucgagaacauucauuaugcaaaagucaggaaaggagaaacagaacugucauuuggauugugaaaguauucucuggggagcugcccuacuguaucuauaau

SEQ ID NO: 397314 - RNA, 71 nt, Homo sapiens
cuuggagaaccccuacaaggcacugugucagaggaccauccccaauacacguagucaugagauucuccaag

SEQ ID NO: 397315 - RNA, 93 nt, Homo sapiens
guguucuaccaccuuucuuuuucuugcaugcuuggguaggaaaaaaaucauuggcuaaguuaaucaaggagaucugaaaaccaagguaaauau

SEQ ID NO: 397316 - RNA, 63 nt, Homo sapiens
caggcuugugacuauuccaaagaaugaauuacauggagugaugcaauggaaugucuaagccug

SEQ ID NO: 397317 - RNA, 64 nt, Homo sapiens
uucgguuugccaguauuuuauugaggauuuucauguugauguucaucagggauauuggccugaa

SEQ ID NO: 397318 - RNA, 90 nt, Homo sapiens
cucaauccuggggucuuucugugguguaacucuuggggcgugcccaugggggcugccucgugcugaccacagcaaggcccaaggaaugag

SEQ ID NO: 397319 - RNA, 85 nt, Homo sapiens
caugaacggauguuggauucuauugaaggcuuuuuccacauguauugagauaaucauauggucuuuguuucuaauucuguuuaug

SEQ ID NO: 397320 - RNA, 80 nt, Homo sapiens
guccuugagauuaucuugaucuugaaaguugcuggccuuugagcaacuucuucaaacccucaagaugcauccccauggac

SEQ ID NO: 397321 - RNA, 64 nt, Homo sapiens
aaaguaaauagcagaacagugucucacugcaugugugugaugcacaguugcugguagauacuuu

SEQ ID NO: 397322 - RNA, 78 nt, Homo sapiens
guauugguguuuggcaaaaagguuugugcagccugagagucaugcguucaaaucuucguuuugccauauccuaguugc

SEQ ID NO: 397323 - RNA, 57 nt, Homo sapiens
uugacagagcuaggucaacucugcuucacaggguguugguugacacuggcucuucag

SEQ ID NO: 397324 - RNA, 62 nt, Homo sapiens
gaugagguaguguaccuagucuuagaguuugcaaaugauagacacaggauauacaccugauc

SEQ ID NO: 397325 - RNA, 81 nt, Homo sapiens
gaaucaaaagaaaguuuuaagucuuuuugagaugaauccucacaaacaaaggaguuucacagagggcuucuuucuagauuu

SEQ ID NO: 397326 - RNA, 89 nt, Homo sapiens
uaauuuuagguagaauccaaguagucauuuuuaagaacuggaagaucuuuguuuuuggguaaugauuaucaauaauucccacaaaauua

SEQ ID NO: 397327 - RNA, 59 nt, Homo sapiens
aacuucuacucuauuugagacauugguaauuucagucuucguuuaaagcaguggaaguu

SEQ ID NO: 397328 - RNA, 56 nt, Homo sapiens
uguuucuuacguuuuuagaggcuucgugacggaguuaucagagacauugagaggca

SEQ ID NO: 397329 - RNA, 100 nt, Homo sapiens
ggacacuuuucuagauagaaggagaaggagugugauucuucaguuuuauucucaaugaaauuaaguuauaauacuuuuuguccugaagucuacuuugucc

SEQ ID NO: 397330 - RNA, 95 nt, Homo sapiens
gaauucauaggaguuugggauucauaucaagucuuagaguuuaagugucauaagcugauggucuuguaugaugucauuacuccuauuauguauuc

SEQ ID NO: 397331 - RNA, 67 nt, Homo sapiens
uuacuugcuugcaugucauaacugauggaaauaaaaauauuucuguuuacacauaugcaaaaagugg

SEQ ID NO: 397332 - RNA, 58 nt, Homo sapiens
gcuagagccugugccuucuagggaccugugugagccagacuagagcacaagcuuuggc

SEQ ID NO: 397333 - RNA, 116 nt, Homo sapiens
cuauguuuucuccuaaaaguuuucuaguuuuacauuuugcauuucgaucuuauagugcacucugaauuguuuacgagaugugagauuuagguagacuuuuauuuccguuugcaugg

SEQ ID NO: 397334 - RNA, 62 nt, Homo sapiens
uugcaugcaaaucuuaaguauguguguauaaauauacauauacugagugauuugcuuugcaa

SEQ ID NO: 397335 - RNA, 91 nt, Homo sapiens
gcccagcgaugaacauacaagugcauaugucuuuuuggaagaaugauuuauuuucuuuuggauauauuacucaguaaugggauugcugggu

SEQ ID NO: 397336 - RNA, 64 nt, Homo sapiens
uucuuuacggccaguucuuauuggaauuaaaauucaaguauuaguuccuacuggcuguaaagaa

SEQ ID NO: 397337 - RNA, 79 nt, Homo sapiens
cuauauuuauacuacuauaaagagguaguuguagcaaucugguccuaaauuauugaucucuauaguaguauagagguag

SEQ ID NO: 397338 - RNA, 76 nt, Homo sapiens
guuuaggacaugcuaaguuuaagacauccauuauacauucaaagggagauguugcaauugauguaugucugaagau

SEQ ID NO: 397339 - RNA, 88 nt, Homo sapiens
gaauaugugaguauauacaugugugagcgaagaugugagcacguaagcauaugugagugucucaauauguguguaaguucauauguuu

SEQ ID NO: 397340 - RNA, 63 nt, Homo sapiens
cuaugguuucucaaacuccugacacccucacaggcugcacauaucccaguuugagaaacguag

SEQ ID NO: 397341 - RNA, 79 nt, Homo sapiens
uauauacacauaugcauguguguacaugugcacacacacacuguauguggacauguauauauauguguguguguauaua

SEQ ID NO: 397342 - RNA, 60 nt, Homo sapiens
gaaugagccagagaggcagacauuaucuugcagaaaaagucaguucuugugguugcauuc

SEQ ID NO: 397343 - RNA, 60 nt, Homo sapiens
caccuggcuauucccucaaucugggcccuggggccauggcaauguggaaugguccaggug

SEQ ID NO: 397344 - RNA, 69 nt, Homo sapiens
uuugaggagguagucugucccuuagcagagcuagagagcugugcuggaagauccacugcucucuucaga

SEQ ID NO: 397345 - RNA, 55 nt, Homo sapiens
auugaaaaaugacuauugcuuaaguuuguuuucuuaagcugaguguuuuuuuaau

SEQ ID NO: 397346 - RNA, 66 nt, Homo sapiens
uguagcuucuccuuucauucccuguagaaucugucuuguucucauggagucaggagcagaaauaca

SEQ ID NO: 397347 - RNA, 64 nt, Homo sapiens
auugugaauagugccgcaauaaacauaugugugcaugugucuuuguaguagcauuauuuauaau

SEQ ID NO: 397348 - RNA, 89 nt, Homo sapiens
cugugaguccggggcucucuucccuguaucuucugccauguaguugcugggugggcaugagguagggaauggagucaauggugaagcag

SEQ ID NO: 397349 - RNA, 72 nt, Homo sapiens
uuguuuuugagacgaagucucacucuugucccccaggcuggagugcaauggugcgauuucggcucacuacaa

SEQ ID NO: 397350 - RNA, 120 nt, Homo sapiens
auauauauuugcaauaaauaaaugacuacauguaaugaauauaugcacacgugugcauaugcauauuuauauacgcauauauauauguguguauauagacaugugucuguggauauauau

SEQ ID NO: 397351 - RNA, 73 nt, Homo sapiens
gcugcugcuguuuaguuucuccuggguuguggguaucuuucccauuccagaagauuugagcagacaggccagc

SEQ ID NO: 397352 - RNA, 68 nt, Homo sapiens
ugcacuugauaaguguguauauucugcuguuguugggugcaguguuuuguauacauauguuaggugca

SEQ ID NO: 397353 - RNA, 55 nt, Homo sapiens
auggcaaugaacgucuacggcacaaccgcagugcugugacuguugcauuugucgu

SEQ ID NO: 397354 - RNA, 102 nt, Homo sapiens
uugagauggaguguaguuuuguugcccaaguuggggugcagugcuccaucuuggcuuacugcuaccuccagcuucuggguccaaguuauucuccugccucag

SEQ ID NO: 397355 - RNA, 102 nt, Homo sapiens
agaaggggaagaaagagaagcaggauaggguauccuuaacaauacuuaaguuuguaaagaucauaugcuguucuauuuacaauucuuacuuuaugaacuucu

SEQ ID NO: 397356 - RNA, 98 nt, Homo sapiens
gguuggugaaaaagcaaucacaguuuuugccauaaaguaauggaguuuuucacugccaugaaguaauggcaaaaagugcgauuacuuuuucaucagcc

SEQ ID NO: 397357 - RNA, 103 nt, Homo sapiens
aggcaacagcuggggagcccuccuucacucuacaucuuuguucugcucucuuuuccauccccaaagaaacagaggaggaggaagcagagcccccaucgcgccu

SEQ ID NO: 397358 - RNA, 70 nt, Homo sapiens
cccagucucagguauuucuuuuagcugugugagaaugaacuaauacaaaaaauugauacugacgaguggg

SEQ ID NO: 397359 - RNA, 77 nt, Homo sapiens
uaguuuacugagaaugaugauuuccaauuucauccaugucccuacaaaggacaugaacucaucauuuuuuguggcug

SEQ ID NO: 397360 - RNA, 73 nt, Homo sapiens
cucucaguccugcgcgccucugugggccaagacacacccacagaaaugcagcaugaggcggcaggccugaggg

SEQ ID NO: 397361 - RNA, 59 nt, Homo sapiens
ucugaaagagcauuugaaugggugcggcaguccacaccuguaauaucagcacuuugaga

SEQ ID NO: 397362 - RNA, 82 nt, Homo sapiens
aguucuaggguacaugugcacaacaugcagguuuguuacauauguauacaugcgccauguuggugugcugcacccauuaacu

SEQ ID NO: 397363 - RNA, 116 nt, Homo sapiens
acaagggcgaauuauauuagguuuuuacaaccauuguaagggcuuuggcuuuucucugcaugaaauucaaagauguuauaaaguuuuaaauacagaugugaugugauuggacuugu

SEQ ID NO: 397364 - RNA, 103 nt, Homo sapiens
ugcuaccagugugacaucacugaaugugagguuggggagagauguacaguaacacaucaugacaguacuuccagcacucagauucagagggaccacaagagca

SEQ ID NO: 397365 - RNA, 77 nt, Homo sapiens
gcuuugcccugagaugcuguuaaucuguaacuuuagccccgaccuugagcucacagaaacauguguuuuauggaacc

SEQ ID NO: 397366 - RNA, 57 nt, Homo sapiens
cuaggcacgccugggucuccaggacugcugaagcacaagacccgagggguggccugg

SEQ ID NO: 397367 - RNA, 60 nt, Homo sapiens
uuuugcucuucauagguccuguuuuugcuugcacauuuaauaguagguggagaugcaaaa

SEQ ID NO: 397368 - RNA, 63 nt, Homo sapiens
uucugcaggcuuuacagaaagcauggugcuggcaucugcucagcuuuuugggaggccuuagga

SEQ ID NO: 397369 - RNA, 57 nt, Homo sapiens
cagaccagaaagcagugaccaguaggcugaauuuggcuaguggguguuuucuguuug

SEQ ID NO: 397370 - RNA, 93 nt, Homo sapiens
uugaaaccaggcccacaggucucucucaguugucuaauuaguuuaacccauuagagguaaggcagcugugagugaaaaugggcuugauuuuga

SEQ ID NO: 397371 - RNA, 58 nt, Homo sapiens
cuucccuuucuuaaagaguuaggcagugauauacaugucauuuagaaguaaagggagg

SEQ ID NO: 397372 - RNA, 61 nt, Homo sapiens
ugugugucagggacggcugaaccucggccugcagccgccacaucaccuugcccugcacaca

SEQ ID NO: 397373 - RNA, 57 nt, Homo sapiens
cacauaggcuguaugguacagcccauggcuccaaacuacaaaccuguacagcaugug

SEQ ID NO: 397374 - RNA, 60 nt, Homo sapiens
gaauccauguguacuccauguuuuccacuuauaagugagaacauacggcauuugguuuuc

SEQ ID NO: 397375 - RNA, 99 nt, Homo sapiens
ggggaugguggggaccgagauggaggaggaagcugaaacaagagggcccuuguucucauuuccauccucuguguaccugccucugccccaccagccccc

SEQ ID NO: 397376 - RNA, 87 nt, Homo sapiens
ggaauacacaguugcucuuugguauuuguggggaauuuguuccaggaaucccccaugaauaucaaaaucugagaaugcucaaguucc

SEQ ID NO: 397377 - RNA, 63 nt, Homo sapiens
gggcucucuuccugccuugcugacuacuucuugcuguaucuucacauggcagagaagaagcuc

SEQ ID NO: 397378 - RNA, 91 nt, Homo sapiens
ugguugaauuuucucuguagagcaauuaccaguaugagucaaaggccaugauuuauguaggcuauagcucugcaauuuagauuguuuacua

SEQ ID NO: 397379 - RNA, 81 nt, Homo sapiens
caggauuuugcuaugucagccaggcuggucuugaacuccugaccucaggcgaucugccugccuuggcgucucaaagugcug

SEQ ID NO: 397380 - RNA, 70 nt, Homo sapiens
uaagucuggagguacaggaaauaaggaauucuuuuagggcugcuauagaaguuuuguacucugugacuug

SEQ ID NO: 397381 - RNA, 94 nt, Homo sapiens
ugaggaacugcuaugcuauguguuugaguugguuugggcuguuguaacaaaauagcacacuggguggcuuaaacaacagaaaugcauuuucuca

SEQ ID NO: 397382 - RNA, 64 nt, Homo sapiens
agcccucccaguucaaugauauggaaacuguacucuacaguguugcagacaagaacacagggcu

SEQ ID NO: 397383 - RNA, 64 nt, Homo sapiens
uucgguuugccaguauuuuauugaggauuuuuauauuaauguucaucaaggauauuggucugaa

SEQ ID NO: 397384 - RNA, 75 nt, Homo sapiens
uuaaugugcuucucuaccauagggucauuuagaaauucuuucuccucuugcuuucugugguagcaagcaaauuaa

SEQ ID NO: 397385 - RNA, 70 nt, Homo sapiens
ucagugacagcaccuugacccugguaggcauucagaucagccucaacacauuagcaagugcuguuauuga

SEQ ID NO: 397386 - RNA, 60 nt, Homo sapiens
ggcgcaguagcggggcccagagcauacaagggauugggcuuuggcuucucugcugcagcc

SEQ ID NO: 397387 - RNA, 65 nt, Homo sapiens
uuuuuaagcuccuuugaugucaggcauuauuucuugcucuucuugccugacauugagcugagaaa

SEQ ID NO: 397388 - RNA, 76 nt, Homo sapiens
uggauauaauagaaugucaguauuggcuaaaaucguccaauguuucaggcucucuggucauucaaauuuuugucca

SEQ ID NO: 397389 - RNA, 105 nt, Homo sapiens
gaaaauugcagcuuuggguuaggucacuggaguugggucaagauucucuuugagagcaauggaguaugaaacccacuccaauuuggucagacccagguaauuuuu

SEQ ID NO: 397390 - RNA, 72 nt, Homo sapiens
cucacagagugagacccugucucuguuagaaaaaaaguaaaaaauuaaaggauuucagccuuacucuguggg

SEQ ID NO: 397391 - RNA, 78 nt, Homo sapiens
caauguuaauacugagaugugagguacuaucccagccaucauguugauuguuaccuggauauuuuguguucuccauug

SEQ ID NO: 397392 - RNA, 94 nt, Homo sapiens
gagccauaugcccaagguuuaugccauagcauugggugauuaagugagguagauuacugccuaaaguagugguuuaggcugggugcaguggcuc

SEQ ID NO: 397393 - RNA, 81 nt, Homo sapiens
aaaaucaccucgggagacuuugaagaaguagaaguuccuguguuuuaucccuucccuuucuggaguuucccaagugauuuu

SEQ ID NO: 397394 - RNA, 62 nt, Homo sapiens
gcacgugggugugugcacguggguguguguacgugcucauccuugguuggcgcccuaugugu

SEQ ID NO: 397395 - RNA, 71 nt, Homo sapiens
uacuaugcucaguaccugggugacaggauuauuuguaacccaaaccuaccacccagguacuaugcuuagua

SEQ ID NO: 397396 - RNA, 60 nt, Homo sapiens
uaugacauaguccuuaacccuccuccccacccugggagcaaggaagagauuaugcccaug

SEQ ID NO: 397397 - RNA, 57 nt, Homo sapiens
acugauggaagcccuucagaauggaugaugggaaaccaacuggaaggcuacuacagu

SEQ ID NO: 397398 - RNA, 87 nt, Homo sapiens
uucacuguuguauccccagcaucuaguacaacuacugguauauaauaaguacacaguaaauauguauugaaugcauagacuagugaa

SEQ ID NO: 397399 - RNA, 59 nt, Homo sapiens
gggaguggcagguuauaugguaauauaugguaauaugucaucauuggaaucugccuccu

SEQ ID NO: 397400 - RNA, 62 nt, Homo sapiens
agguugagauagucuacagggaaaauguugaucauuucuacauuuguaaacuaccucaaccu

SEQ ID NO: 397401 - RNA, 75 nt, Homo sapiens
ccccagcauuugugaauguuuucuuacaugguaaagagacuuugcacaugugaugaacaaucuugaggccagggg

SEQ ID NO: 397402 - RNA, 92 nt, Homo sapiens
agggccacgccuuacacaaggugacaugaaaaauguugagguguagcaguuuauucccuuagguuaaucaugaaccuuucuguuaggccccu

SEQ ID NO: 397403 - RNA, 81 nt, Homo sapiens
ucuugggaaguuugcaguagcucuaaggguucaacaagcaaaauaaaacccugugaauauuuaaacuucagucauccagga

SEQ ID NO: 397404 - RNA, 104 nt, Homo sapiens
cugauuuuuguauguggauuuuauauccugaagcuuuacugaauucauuuaucaagucuaagaguguuuugguggagacuuuaggguuuucuagauauaaucag

SEQ ID NO: 397405 - RNA, 64 nt, Homo sapiens
gugagaaugaugaguuucagcuucauccaugucccugcagaggacaugaacucauucuuuuuau

SEQ ID NO: 397406 - RNA, 61 nt, Homo sapiens
gcaucacugggagcagccauuaauaauacaaacauuuauucuugguguucuccaguaaugc

SEQ ID NO: 397407 - RNA, 98 nt, Homo sapiens
ggggcugguuuacucuaauacucuauaagggaagcuguagcagcugcguuacaggagcacgguuuuuauuguauguaauuuaggguuuuuguagccuu

SEQ ID NO: 397408 - RNA, 84 nt, Homo sapiens
aauuuaugagguuccuaaucuccauauguucaguuaugcagugaaauaugauuuguuugcauugcauagacauccucauagauu

SEQ ID NO: 397409 - RNA, 130 nt, Homo sapiens
cccaccuugguuucacaacaugcugggguuacaguugugagccaccaugcccuggccaagugaaauuaggaaugggcugggugugggggcucaugucuguaaucccuacccuuaggcaagcagaggcggg

SEQ ID NO: 397410 - RNA, 127 nt, Homo sapiens
gugauccgcccgucucggccucccaaaguccugagauuacaggcaugagccacugugcccgaccgggcaugaugucuuaugccuauagucccagcacuuugggaguucaaggcagcaggaggauuac

SEQ ID NO: 397411 - RNA, 76 nt, Homo sapiens
cuugauuucaguggugaugcuguccauguccagggagcggcuguuguccauggacagcaccacagauguguucgag

SEQ ID NO: 397412 - RNA, 73 nt, Homo sapiens
uuggcaaaugucacaaaucaggacuuuuccccaccuacccacugcuaagagcugguuauuaaacauuugccaa

SEQ ID NO: 397413 - RNA, 85 nt, Homo sapiens
uccaagucuuugcuauugugaauagugcugcaauaaacauacaugugcaugugucuuuauagcagcaugauugauaaucuuuggg

SEQ ID NO: 397414 - RNA, 113 nt, Homo sapiens
agagaacuuuuuaaaacuuccuuuucuaggugcaugcuucacuggauauugauaaucuuucuuuucucuguguucucuagagcuguacaaagaaaggugauucuaaaaucuuu

SEQ ID NO: 397415 - RNA, 60 nt, Homo sapiens
uagaaggggauuauucugcccagggauggcuuaacugggauggaaugcagccuccuucug

SEQ ID NO: 397416 - RNA, 66 nt, Homo sapiens
ucucacauucaauuguaauccccgauguuggaguagggccugguggaaggugauuggaugacgggg

SEQ ID NO: 397417 - RNA, 118 nt, Homo sapiens
cuccuuccagcuuucugcucugccauuacuagaaugugaacaucuugaaaguccagccugcacaguuucauccucagacuucacguuccauguagcagguuagagaaagaggaaggag

SEQ ID NO: 397418 - RNA, 87 nt, Homo sapiens
gcuugcgggccagcuagaguuccaggugggcgugggccuggcgggccccacacucggagcggccggcccgcccugcuggccccaggc

SEQ ID NO: 397419 - RNA, 101 nt, Homo sapiens
aguuuauucuuucaugugcauuuuagaaaaucagcgugucaaauccuucaaggguucuguuuggauuuggcagcugcuucaugggaugcgaagguuaaacu

SEQ ID NO: 397420 - RNA, 68 nt, Homo sapiens
gagaggaaagccauucagcucucagggucaacaaguugguugacccugaagccaugaguggaacucuc

SEQ ID NO: 397421 - RNA, 55 nt, Homo sapiens
cuuggagaugagcaggauguggagguagcccucgaucaccgugcaguucuccagg

SEQ ID NO: 397422 - RNA, 73 nt, Homo sapiens
gauguuguaagauaccccacucucggugcuguugaccccauagauggcucugcaggugaggguagguggcauc

SEQ ID NO: 397423 - RNA, 64 nt, Homo sapiens
aagaggcagaaauaucgcugaauggugaaaaacagcucccccauauucagcagugucugcucuu

SEQ ID NO: 397424 - RNA, 76 nt, Homo sapiens
gcaggaagugaauggugggcuagcuagugaagcuucaucuguauucacagccgcaccccaucacuugcauuucugc

SEQ ID NO: 397425 - RNA, 80 nt, Homo sapiens
aagaucacuuuuauuaccuagggcauuagucucaaaccauuauuaacuagaucacauauugccuuuguaguaggugucuu

SEQ ID NO: 397426 - RNA, 87 nt, Homo sapiens
ggcugggaaggagaggaagaggaggcccucgcugggauuuauuuuucuggaggcgcugagacgucuucucuucuucaaagcucaguc

SEQ ID NO: 397427 - RNA, 109 nt, Homo sapiens
gggacagagagagaggaggagguuggcuugagaugaagcuagaagaaugggcaaacuucacuucucuuuguucauuuguaccccaaguuguauucaucccuuucugccc

SEQ ID NO: 397428 - RNA, 85 nt, Homo sapiens
ucucaugaugugaccaucuggagguaagaagcacuuuguguuuugugaaagaaagugcuuccuuucagaggguuacucuuugaga

SEQ ID NO: 397429 - RNA, 78 nt, Homo sapiens
cagugucuuuuaccuuugucaguuacucaccuauuauuauaugugguuuuuuugcaagggccaaagauugagacauug

SEQ ID NO: 397430 - RNA, 80 nt, Homo sapiens
aaauggaaccugagucucugaggugggggcaaaucuguuucuaagguggagucauaucucagagaaucagauuuacguuu

SEQ ID NO: 397431 - RNA, 114 nt, Homo sapiens
agaguuaaacuaagcauucaguauguguguguguguguguguguguguguguguguguguguguguacguacaugcauacaugcacaucuguuguggaaugccuguuucucucu

SEQ ID NO: 397432 - RNA, 70 nt, Homo sapiens
cucaagguagucaagugggguuagauaguuuuucaagaagaacgaaggaaagugcaugacuaucauuggg

SEQ ID NO: 397433 - RNA, 56 nt, Homo sapiens
gggcggggcgagacagccagagcuuuucccggggucucuggguuuuggccacgccc

SEQ ID NO: 397434 - RNA, 87 nt, Homo sapiens
gaggacuccuaagugaggcuuuuccuguuagacuacguauuaagcaaggucagaguuugccagguaaggacucaauauggaggccuc

SEQ ID NO: 397435 - RNA, 83 nt, Homo sapiens
aauuaucacaugugauagguugucacugucacuguugcuacugcccugguucaaagucacaggcaucucucacuuggauaauu

SEQ ID NO: 397436 - RNA, 56 nt, Homo sapiens
ugaguagucagugggcaggaaggggaguuuuuaccuuccucugcaacugaugcuca

SEQ ID NO: 397437 - RNA, 76 nt, Homo sapiens
ugucaucaucagagugcagggaguagcagcaaguugggauucagccagcucuaaacuccuugcucucuuucggaca

SEQ ID NO: 397438 - RNA, 71 nt, Homo sapiens
auagccugguaguuaucuugagguaggugugacuucagggucacagauaaauaaagaugauuaccaucugu

SEQ ID NO: 397439 - RNA, 78 nt, Homo sapiens
guagauauuacaagcagcauuaccaagacauggcaaaaagaguuugucugaauuguaauguugcguuugugaaccuau

SEQ ID NO: 397440 - RNA, 100 nt, Homo sapiens
guagauguauguggaguuaagucguggaugauucuucgguuuaaauuauuuucuuguuucugugggaucccaugacuuuccagacaucacucaccucuau

SEQ ID NO: 397441 - RNA, 57 nt, Homo sapiens
uuucaggguuggaucuuuauuaauauguaauaucuaugagguauccaagcccagaaa

SEQ ID NO: 397442 - RNA, 66 nt, Homo sapiens
ucuauauaauagguugauugacauugccugcauaugguaggucaauguuaguauuuauuaaaugga

SEQ ID NO: 397443 - RNA, 80 nt, Homo sapiens
gugcgaagccugggcaaaacuguacugccaaggcuguggggccuuggaaaggacagauaguucugcuggcugaaagacac

SEQ ID NO: 397444 - RNA, 86 nt, Homo sapiens
guggaugauccucugugcuugcuucuucuccuaguccguguauggcgugacugaagagucccaggcacagagcccggugcauguac

SEQ ID NO: 397445 - RNA, 67 nt, Homo sapiens
agucauagaguuugcccuucucacuucaaaaauggagaaacagccuagagggguaaauucugucacu

SEQ ID NO: 397446 - RNA, 71 nt, Homo sapiens
gccuacagucuggagaaugggugcucaauugaggauauucuuagaggagauaaauuguccuagauuuaggc

SEQ ID NO: 397447 - RNA, 65 nt, Homo sapiens
uuuuugcaauuagccuaacaugaggcccagucucuacaagucaccucauguuauguuuguagaag

SEQ ID NO: 397448 - RNA, 130 nt, Homo sapiens
ucaggaagcugagguaggagaaucgcuugaaccuaggcggcgagguugcagggagcagagaucgcaccauugcacuccagccugggugacaagagugaaacuccaccucaaaaaaaaaaaaaauuacuga

SEQ ID NO: 397449 - RNA, 59 nt, Homo sapiens
gcccugcagggguugcagugguccaggcaguaaaggguuuucucaaccucaugcagggc

SEQ ID NO: 397450 - RNA, 61 nt, Homo sapiens
guguucaaauucugacagagagcuggucucaaauuccagcagucacugaccaguugaauac

SEQ ID NO: 397451 - RNA, 85 nt, Homo sapiens
agaaaugaguuuaaaugguagucguuucaguuaagaucuaagaaagacuuugggaaugaguuuaucauuuauuauaauuauuuuu

SEQ ID NO: 397452 - RNA, 69 nt, Homo sapiens
gugucaugggcauguccuuaaccuuagcaaaauacacuuccuaaauugauugaggccugucccagauac

SEQ ID NO: 397453 - RNA, 55 nt, Homo sapiens
aaugaucaauguuugaggugauggauauccaucccaauuacccuauuugaucguu

SEQ ID NO: 397454 - RNA, 64 nt, Homo sapiens
guaaucucagcuacuugggagguugaggcaggagaaucccuugaacccaggaggcagagguugc

SEQ ID NO: 397455 - RNA, 59 nt, Homo sapiens
ugagacugaguuuugcucuuguugcccaggcuggaguacaauggugcgaucucagcuca

SEQ ID NO: 397456 - RNA, 80 nt, Homo sapiens
gcuauaaagaacuaccugaguuuuauagucucagguaguucuuuauaccugagacugauugacucacaauuccacauggc

SEQ ID NO: 397457 - RNA, 64 nt, Homo sapiens
cuucaggugagcaggagauaaacagguaggauucaaggcuuaccagucugauuccuguuagaag

SEQ ID NO: 397458 - RNA, 76 nt, Homo sapiens
ugucuuuaucagcagcaugaaaagcaacuaauacgguaaauugguaucaguugagugaagugcuucugauaagaua

SEQ ID NO: 397459 - RNA, 56 nt, Homo sapiens
gaggacaugugauaugcugcuggcuggcuggggcugugcagaugccacagucacuc

SEQ ID NO: 397460 - RNA, 77 nt, Homo sapiens
guggcugauguguacuguguaguuagaccucagacgguugcaucugugcugaacauacacggaccuuuucuugucau

SEQ ID NO: 397461 - RNA, 76 nt, Homo sapiens
ucgcucuguugccuaggcuggagugcaguggcaugaccucggcucacugcaaccuccgccucccggguucaagcga

SEQ ID NO: 397462 - RNA, 70 nt, Homo sapiens
gacaauuuucccaacaagauuuaucgaagagacuaucuuuuuuccauugugucaucuuggugggcuuguc

SEQ ID NO: 397463 - RNA, 88 nt, Homo sapiens
augguuucccuugagcauauucuauauuaaaacuuuuacauucuggcuguauuugguagagaauaugaucaaaagucagggauauuau

SEQ ID NO: 397464 - RNA, 65 nt, Homo sapiens
ucccagcaugacagagauaugugaauuuucaaacagaaaauucaaaaguuucuguguuuugagga

SEQ ID NO: 397465 - RNA, 102 nt, Homo sapiens
gucuuggcuaugucuuuauagcagugugagaauggacuaauacaacuaguauguucauugcagcacuguuuaugauacugaagacauggagucaaccaagau

SEQ ID NO: 397466 - RNA, 62 nt, Homo sapiens
caaauugcuuguggaggauaauugauugucuuugccucgauugucuuugccucaagaguuug

SEQ ID NO: 397467 - RNA, 97 nt, Homo sapiens
cuggccaccggcccugcagccaggcgguguugauggcccccacagcuguggccacacgugugcccagccaucagccuccggacaggcggguggccag

SEQ ID NO: 397468 - RNA, 79 nt, Homo sapiens
aggcuggagugcaauggugcuaucucggcucacugcaagcucugccucccgaguugacgccauuguccugccucagccu

SEQ ID NO: 397469 - RNA, 76 nt, Homo sapiens
gauagguaaacuuccacguuugaucaugcagcuggaaaacuuaauagugaauuaaauguuggacguauacauuguc

SEQ ID NO: 397470 - RNA, 103 nt, Homo sapiens
ccucaaccauggguuuauaugauugguagacccugcagauccauucccaaugguguaucuucauacuaaucaugaaauccaucuaauagccauacaagugagg

SEQ ID NO: 397471 - RNA, 89 nt, Homo sapiens
gccgaagcuauggauuugcauuccccaugucauuuuaguuaaaaugaggaaugcuuggaauuuauauauaaacagcauuguguuuuggc

SEQ ID NO: 397472 - RNA, 60 nt, Homo sapiens
caucagaaugugcauuuuaacaaggaacccagguaauucaaaugcacauuacugcuggug

SEQ ID NO: 397473 - RNA, 69 nt, Homo sapiens
gugggaaaaugucuauugaaugaagaugucaccugaaaccaguccucuuuauaaaguuagauaucucac

SEQ ID NO: 397474 - RNA, 65 nt, Homo sapiens
aggaagaacagauaauggacgcuggaagcccuuucuugccuggcaccgguuaaucuguuuuuucu

SEQ ID NO: 397475 - RNA, 74 nt, Homo sapiens
agaguccugagguagcucaggguauugcauaguugaggaggacugagcauacuaaugugcuagcucaggucucu

SEQ ID NO: 397476 - RNA, 81 nt, Homo sapiens
aucuccuggucuggaagcaggugaugaguggguguggaaucuacauuugaguaucacuuguucaaccacaagaccauagau

SEQ ID NO: 397477 - RNA, 65 nt, Homo sapiens
gugugagcagaguuguuucuccugaggccccucuccuuggccugcagauggcugcugccucacau

SEQ ID NO: 397478 - RNA, 71 nt, Homo sapiens
gagaaagcuacauuuuauuuaugucaguguguaaaauuauaaccugauaaugaaagaaauacaguuuuuuc

SEQ ID NO: 397479 - RNA, 60 nt, Homo sapiens
uuuaaguguuuguuccugaaaagcuguauuuuaauugcuuucaggauuuagcauguugaa

SEQ ID NO: 397480 - RNA, 88 nt, Homo sapiens
gccugugcgcauguguggguuugugugagugcccauguaugcacacguguauaugcauguacccacacaggcccaucuccucacaggc

SEQ ID NO: 397481 - RNA, 89 nt, Homo sapiens
ccauguguacuggguguuuagcugcacuuacaagugagaacacgcaguauuugguuuucuguuccugcauuaauucacucaggucgugg

SEQ ID NO: 397482 - RNA, 101 nt, Homo sapiens
gccuugggauccugggcaagccacuucuuuucacuguggagaguaaaaacauuuucacuguaaaaugaagaggguugaacuagacucuggucaccaaaggc

SEQ ID NO: 397483 - RNA, 77 nt, Homo sapiens
uaguagaagccuucaguggacauuuucaucuuacauacuugaaauggagaugugcgaacugaguaauauuucuacua

SEQ ID NO: 397484 - RNA, 78 nt, Homo sapiens
ugguugucacccuggucuggagagucccgcccagagaacauuuugggcacuaguccagagccuuggguuugaaugcca

SEQ ID NO: 397485 - RNA, 84 nt, Homo sapiens
ccuuggccucccaaagugcugagauuguaggcaugagccacuugcccagccugcacagaacuuuuaauaauggaagcuuuaagg

SEQ ID NO: 397486 - RNA, 59 nt, Homo sapiens
gaggcaguaguaauugaaauaagguagaccaauacugguauaugacuuacuauugccuc

SEQ ID NO: 397487 - RNA, 82 nt, Homo sapiens
cucauggauugcuuaggcuuccuuacaguauggaaaucacagaauagccaagcuuguucuaggaagcuagcuucuuccagag

SEQ ID NO: 397488 - RNA, 57 nt, Homo sapiens
cucaccucgugaucugcccacuucggccucccaaagugcucggauuacaggcaugag

SEQ ID NO: 397489 - RNA, 60 nt, Homo sapiens
ugagacggaguuucgcucuuguuguccaggcuggagugcaauggcgcgaucuccggcuca

SEQ ID NO: 397490 - RNA, 55 nt, Homo sapiens
cugagcaaaaugaagacacgaugcagaauucagcaaaguucacaugagugcucag

SEQ ID NO: 397491 - RNA, 57 nt, Homo sapiens
guugugaacacagaggcuauggcacggcuucccgugcaagcuucaugguuuacugac

SEQ ID NO: 397492 - RNA, 70 nt, Homo sapiens
ugacaaaaccuuuugugacauaccuauauuugaaaaaauauauggccugaauuagaaaaguguuagguca

SEQ ID NO: 397493 - RNA, 57 nt, Homo sapiens
uuaggccuuugauuggggugcucugugcuacagguagugccaaaucgagggcucuga

SEQ ID NO: 397494 - RNA, 57 nt, Homo sapiens
ggugagagugugucagaggcugcgagggaccccuuuagccuuggacccgcucuggcu

SEQ ID NO: 397495 - RNA, 85 nt, Homo sapiens
ugacuccggaguauaaaugagagaauuucugauagguuuguaaugcauaauuacauugucauauucucucucuuuuugguaguca

SEQ ID NO: 397496 - RNA, 113 nt, Homo sapiens
gggggaggcgggugcaugaaggagugaacaggcuguggaagcacaggccuccuggaugcccuguguccugggggcucuugguucuacugagcucaccucuaccugccccuccc

SEQ ID NO: 397497 - RNA, 70 nt, Homo sapiens
gacuacuguaaaccuagcauuuugcauauguauuuuugugcauguuggugcagguuuauaaucauuaguu

SEQ ID NO: 397498 - RNA, 85 nt, Homo sapiens
caguccaugguauuugguuauugcagccugaauggacuaagauucucuuaauuaaucauggugcaauuaucaaaaucaagaauug

SEQ ID NO: 397499 - RNA, 61 nt, Homo sapiens
uuucucagcgcccuccugaagaggggccuucugggucuucuugaggcaugccgcugggaga

SEQ ID NO: 397500 - RNA, 105 nt, Homo sapiens
gcauuauaagaagauaggaaagacauauggcaaaauguuccuagugguuauugagauaaccacuggauagugaaauuuucuguaauuuuuauuucuucuuggugc

SEQ ID NO: 397501 - RNA, 77 nt, Homo sapiens
ugaaauacuuuguucagaucaagaguaguaauugauaaaugauauugcuuaugaugcugaauuaaauuuguauuuua

SEQ ID NO: 397502 - RNA, 61 nt, Homo sapiens
uaaguuacuuuugcucgaucucuuguuaguuuaguucauugguugaugcugaaguugcuua

SEQ ID NO: 397503 - RNA, 95 nt, Homo sapiens
cuaugcaucaaggaucagucugaacaagcaaggccaugccgucaggaaagauagccugcgcuugcauuguuccgaauguguccucucuuggauag

SEQ ID NO: 397504 - RNA, 57 nt, Homo sapiens
cugagaaguccugcaguaaggaauccaacuagauuugcuuaaugcagcauuucucag

SEQ ID NO: 397505 - RNA, 75 nt, Homo sapiens
agaaagcucacuuugccugagaagccaagaauaaacagauuuuguuucguguuuuagagcaaaaugggauguuuu

SEQ ID NO: 397506 - RNA, 58 nt, Homo sapiens
guggagucauacagaacaagacuguuucuuccuaacagugcuucugauaugaugccau

SEQ ID NO: 397507 - RNA, 68 nt, Homo sapiens
aagggacccuggguacaguuaccaacugccucucccccagaugcuaguagcugcacccaggccuccuu

SEQ ID NO: 397508 - RNA, 66 nt, Homo sapiens
gggugacagaguaagacccuguaucauuauuauuuuauuuugaaacagagucccacucugucgccc

SEQ ID NO: 397509 - RNA, 59 nt, Homo sapiens
gggaacugcauuguucagacuccugugccagcaggguuccugauacgguugcaguucuc

SEQ ID NO: 397510 - RNA, 71 nt, Homo sapiens
aagagagcugguaugugugacugcauugagaguccagagaccugggugcugggaccaugcccuaucaucuu

SEQ ID NO: 397511 - RNA, 123 nt, Homo sapiens
ggaggguauugugacauaucucugguaguaucacuuagguuaugccgcucuucuacuuggucccugccaaccuggagagugacauauuucuaggccaggcacacagaugaugguacucuuucc

SEQ ID NO: 397512 - RNA, 55 nt, Homo sapiens
uaagagagucuguugaucuguaucuucuccaauugcaguacugucagacuucuua

SEQ ID NO: 397513 - RNA, 113 nt, Homo sapiens
cagaguucagagcccuuaagaaauuugaggcuaaaaucugauugacaagguuauuucauuuuguaaauugagcauugguauagguuuuaguuuguuuaugggaucugauucug

SEQ ID NO: 397514 - RNA, 64 nt, Homo sapiens
ccagagguggagccuacagaggcaggcaggccuccuugaucuguggugggcuccacccaguugg

SEQ ID NO: 397515 - RNA, 67 nt, Homo sapiens
cacauuuacauguauguguuuauggcugcauauguauguaucuguguuugcauauguguguaaugug

SEQ ID NO: 397516 - RNA, 67 nt, Homo sapiens
uggggguaaggagauuucuuugugauucccaaaaacauaugagcugauuuccuuaccauauugccca

SEQ ID NO: 397517 - RNA, 61 nt, Homo sapiens
caguaccucaguuggaaaugcagaaaaccuuugucuucugugucauucaugcugggagcug

SEQ ID NO: 397518 - RNA, 83 nt, Homo sapiens
cagcagcugugccuguccugcagagucagaaugaugcgauaacgucauggugggcuggagagaccagcaauaccagcaugcug

SEQ ID NO: 397519 - RNA, 70 nt, Homo sapiens
uuuacugaauguauaaucugugccugacacuugacuaagagcuuucagguauuuuaucacaugaaguaga

SEQ ID NO: 397520 - RNA, 68 nt, Homo sapiens
uagggauacauucugggaaguguguuguuaggugauuucaucauugcaaauaucguagagugucccug

SEQ ID NO: 397521 - RNA, 86 nt, Homo sapiens
ggaggucucuccgugcacggaaaggcauauuuccuucaccaguguuggcguggaggucucuccgugcacggaaaggcauauucucc

SEQ ID NO: 397522 - RNA, 65 nt, Homo sapiens
uugacagcguuggguguuauuagauguaaaauuuuuuugacacaucuaaucaucgcaaccuucaa

SEQ ID NO: 397523 - RNA, 65 nt, Homo sapiens
auguuggucuuaguaauacugugugcauccuugauacacugcaguggaagauuaagaagaaaugu

SEQ ID NO: 397524 - RNA, 85 nt, Homo sapiens
ggauuacaggcaugagccacugugccuggccugaauuuuuaaaugacacauuuaagccaggugugguggcacaugccuauagucc

SEQ ID NO: 397525 - RNA, 74 nt, Homo sapiens
gguuggugcaaguguaauugugaucuuuucccuuacuuucaaugccaaaaaucacaguuacuuuugcaucaacc

SEQ ID NO: 397526 - RNA, 79 nt, Homo sapiens
uaaucaaauuagguuagcuguuuuucagcaaauauucuauucuuggacauugugaaugaagaaugcuaaccuuugauug

SEQ ID NO: 397527 - RNA, 56 nt, Homo sapiens
cagaggaguaacaugaucucaccuggguuucagaugagaucagaaggauuucucug

SEQ ID NO: 397528 - RNA, 83 nt, Homo sapiens
acacauucacauauauacuuuuaguguaagguuuccaugauuaauuacuaauacacuacuggguauauguguuugacaagugu

SEQ ID NO: 397529 - RNA, 67 nt, Homo sapiens
cacugugccagcuggcaaaagaaaacuauuuaaugggcccaucuccauuuuugcagagcugguagug

SEQ ID NO: 397530 - RNA, 74 nt, Homo sapiens
cauugugugcaaauguguaccuacaugugugugaauguccaugugcauuguguggaguacauuugcacugagug

SEQ ID NO: 397531 - RNA, 70 nt, Homo sapiens
uaagacuguuggcaauuuuugcacauugacuuuauaucuugagacuuugcugaaguugcuuaacagcuua

SEQ ID NO: 397532 - RNA, 77 nt, Homo sapiens
gcugggcauguaccugagagugaaguggaugguuucccaguuauccauuuguucagcuucaggaaauacugcccagc

SEQ ID NO: 397533 - RNA, 104 nt, Homo sapiens
uugaggcaggagaaucgcuugaacccgggaggcggagguugcagugagccgagaucgugccauugcacuccagccuagccaacaagagcgaaacuccgucucaa

SEQ ID NO: 397534 - RNA, 74 nt, Homo sapiens
uugugcccagggaauauaaaacuuuugacaggcagccuaucugccuuccuaguaguuguguuuccauuccacaa

SEQ ID NO: 397535 - RNA, 62 nt, Homo sapiens
ugcagucuggcaauggcagacuggcagucuggaggcaugccaugucuuuauucucaacugca

SEQ ID NO: 397536 - RNA, 85 nt, Homo sapiens
uaguucacaugagagcugguuguuuaaaggagccaggcaccuccuccucucucucuugccccagcucucaccauguaauguacug

SEQ ID NO: 397537 - RNA, 112 nt, Homo sapiens
aagcguauaagcuuucaguuauaagauuaaaaaauucuaauguauacagcaugaugguuacaguuaauaauauuauaguguauacuugaaauuugcugagaguguagaucuu

SEQ ID NO: 397538 - RNA, 79 nt, Homo sapiens
ugguuagcauaccuuguagugcuauuugauaguaucccauguagagaaugcacuuggcauuugagguguauucugacca

SEQ ID NO: 397539 - RNA, 101 nt, Homo sapiens
uacauguuccaccuuacaagugguucaugaacacccucaauagugucuguuguuguucccuuguguucaugaguucucauuuuuagcucugagaacaugug

SEQ ID NO: 397540 - RNA, 59 nt, Homo sapiens
ugagacugagucucgcucuuguugcccaggcugggguacaauggcgcgaucucggcuca

SEQ ID NO: 397541 - RNA, 67 nt, Homo sapiens
uagcuacauaauagagagauaucauggguuaaaaaccauuaaugauaagaaauuguucauguagcua

SEQ ID NO: 397542 - RNA, 66 nt, Homo sapiens
ccggcagcaguguuguggagucuauugugagggacaaacucucagaaccuccuagcaguguucugg

SEQ ID NO: 397543 - RNA, 113 nt, Homo sapiens
aacauuuuuuccuucauuucaaccuuggugaaucugacaauuaugugucuugggguugcucuucucgaggaguaucuuugugguguucucuauguuuccugaauuugaauguu

SEQ ID NO: 397544 - RNA, 64 nt, Homo sapiens
caacagugcauucagggauauaucucacuuggucaugguguauaaucuuuuaaauguacuguug

SEQ ID NO: 397545 - RNA, 71 nt, Homo sapiens
ggguagaaaauuauaguagggcaugaauaccagaagguggaauucaugggagcuacuuuaaaagucuaucu

SEQ ID NO: 397546 - RNA, 75 nt, Homo sapiens
uguguaucacaauggcacuauuggaaaagguaguggcauaccuuuuaauaugcggugcuauaagugcuaugcaua

SEQ ID NO: 397547 - RNA, 67 nt, Homo sapiens
agagccacuguccaaauuagauauuagaauucaagcuuuuaaacauuaaugcuuggggaguaguucu

SEQ ID NO: 397548 - RNA, 71 nt, Homo sapiens
auuaagaccuaucucucauaccuuuugauuuacaaauuuguaaauuggugaccaagggaaggacucuuagu

SEQ ID NO: 397549 - RNA, 62 nt, Homo sapiens
ucagagcugccuaaugaacacuuucuuacauucuggaagcaaaguguuuuuaggaagucuga

SEQ ID NO: 397550 - RNA, 82 nt, Homo sapiens
cccagcuuggacuaauuccaccuucuuccugugauuaguguagaauugacaagaguagagagggugccagguccagguaggg

SEQ ID NO: 397551 - RNA, 82 nt, Homo sapiens
auuucuuaacugaugaccaauggcuugaaaacuauuguuccauaugcuuuguucagugauugguuauuuuaggcaggcaggu

SEQ ID NO: 397552 - RNA, 79 nt, Homo sapiens
gcuccuugauggucuggccucaguaagguggugaaauuuccuauucaccuuuacaacuuguuagaguauuacaaggagc

SEQ ID NO: 397553 - RNA, 66 nt, Homo sapiens
aacagaugagguaggccugcuuugaagaaguucccaaagauguucaaauuagucauuuuaucuguu

SEQ ID NO: 397554 - RNA, 115 nt, Homo sapiens
cuuggugaaaauuuuacugcuuggaauccagugauugugaaaacauuaagaagcaccaauguuuucauaaugucacagucaaaacaauucucaggcgaugaguucuaccaccaag

SEQ ID NO: 397555 - RNA, 55 nt, Homo sapiens
cauugcccugaauuugugaaucaucucugaugauugcagaaucacagagguagug

SEQ ID NO: 397556 - RNA, 57 nt, Homo sapiens
cagauuguagcaauugaguacaggauauuccugugaacaaaauuuguugcauauuug

SEQ ID NO: 397557 - RNA, 70 nt, Homo sapiens
ucauuccacaggcagucucugccggcugaggguggugacaaccucuguuugcuggagaugccuggagugg

SEQ ID NO: 397558 - RNA, 87 nt, Homo sapiens
ggagaauugcuugaacccggcaggcggaguugcagugagucgagauugugcuacugcacuccagccuugccaacagagugagacucc

SEQ ID NO: 397559 - RNA, 126 nt, Homo sapiens
gcauaguauuccaugguuguauguaucacauuuucuuuauucaauaugucauuggcaggcauuuagguugauuccaugucuuugcuauugugaagagugcugcaaugaacauucgugugcaugugu

SEQ ID NO: 397560 - RNA, 63 nt, Homo sapiens
uucaccggggaccccuggcugucucaugucucuaucaacuguagccagguuggccuuggugag

SEQ ID NO: 397561 - RNA, 100 nt, Homo sapiens
gaggcagaagaauugcuugaaccugggaggcggaguuugcagugagcugaaaucuugccauugcacuccagccuugggcaacagagcaagacucugucuc

SEQ ID NO: 397562 - RNA, 61 nt, Homo sapiens
uaguuucaccuuucagaaugcguggacucuaaagucgcuaugacagaggaagggggagcug

SEQ ID NO: 397563 - RNA, 87 nt, Homo sapiens
cauauuuucuuuguucauucauucuucaguggguacuuguguugcuuccacauuguagcuauugagaguaaugcugcuaugaaugug

SEQ ID NO: 397564 - RNA, 60 nt, Homo sapiens
uugaaagacagaggggcaaguuggauuaaaaagcgagacccaacuguaugcugucuucaa

SEQ ID NO: 397565 - RNA, 83 nt, Homo sapiens
agaaaaucucagccaagugagguucaaguugguggaaaagaacccuuuucuguuaauaccgucacauggcugaaguguuuuuu

SEQ ID NO: 397566 - RNA, 67 nt, Homo sapiens
gcuauaacaggaaauacagggcuuugggucuuuucuauuccagauucuguuccuguccucuuuuagc

SEQ ID NO: 397567 - RNA, 72 nt, Homo sapiens
agugaugaauugaacuguaccauggugucacaauuauugaccuugguaauguguuuuauucuuugaaucauu

SEQ ID NO: 397568 - RNA, 114 nt, Homo sapiens
aguuugcuaauauuguaucuagaauuuuugaaacuauauucauuggugaaauugcccuauaauuuugcacuuuuguaauaugguuuugggauuuuggcauuaaaguuacaagcu

SEQ ID NO: 397569 - RNA, 56 nt, Homo sapiens
uuuuucacuuaaguuaggcucagaaacaauugaccaccuaauugguugguggaaga

SEQ ID NO: 397570 - RNA, 55 nt, Homo sapiens
uggaugggccaagccacuugcuaauuaaaaauguuauaaaguggcuuguucacca

SEQ ID NO: 397571 - RNA, 60 nt, Homo sapiens
gucauggaaguuuaccauuccacaaauggaaaugaagcuuggaauguuaaucuccaugau

SEQ ID NO: 397572 - RNA, 72 nt, Homo sapiens
uuggcaauuuguaucuucuaauauuaucuccuucuaaccauacuggggauaauucuagcagauacaggcuaa

SEQ ID NO: 397573 - RNA, 77 nt, Homo sapiens
ucggauaaucucagagauaucuguguccuacacagcaggguucuguaaggggcacauggauaccucugagaagcuga

SEQ ID NO: 397574 - RNA, 95 nt, Homo sapiens
cuagcuuuguauauauacuucauguuagugaaauccugcaguacuagucuguuuguaacuggcuuauuucacuuagcauaaguccucaagguuag

SEQ ID NO: 397575 - RNA, 98 nt, Homo sapiens
gcagaauaugaaauuaguuggaauuuuacuucuguaagaauucugaaaauagagccucagacucucuugcauuguaagguuucugcugagaagucugc

SEQ ID NO: 397576 - RNA, 73 nt, Homo sapiens
gcaaauuauuggcaaaugugagaugagaacuuauagcuccugugauucuagucuggcauagccacaaacaugc

SEQ ID NO: 397577 - RNA, 73 nt, Homo sapiens
cccaaacuggagcguggguccaaggcucugguucuaucccagggaucaaagcagcauggcccaguccaauggg

SEQ ID NO: 397578 - RNA, 91 nt, Homo sapiens
uuaauuucaaaauagcauguuuagcaggguuuuuugcgguuguucugaagauccacuguacucuguauaaacauugcuguauaggaauuaa

SEQ ID NO: 397579 - RNA, 58 nt, Homo sapiens
gcccuagaacucgaggcuauagugaacuaugauugcacuauugcacuccagucugggc

SEQ ID NO: 397580 - RNA, 57 nt, Homo sapiens
cuuacagauggauggcagcuggcucuucaccagaugcccaaguugucauuuuguaag

SEQ ID NO: 397581 - RNA, 58 nt, Homo sapiens
gugccuucuagcuaugguuggccacaugacuacguucuggccaaugggauaggagcac

SEQ ID NO: 397582 - RNA, 86 nt, Homo sapiens
acaguuuuuuuucccuucagcagugcauaggugccauuccuuugucuucuggcuugcuuuguuguugaugggaaaucuaugauugu

SEQ ID NO: 397583 - RNA, 65 nt, Homo sapiens
ucaggugcaguggcucaugcuuguaaucccagcacuuugggaggccaaggcaggugaccacuuga

SEQ ID NO: 397584 - RNA, 74 nt, Homo sapiens
cugaguguuggagcagggacuuugccugggugaugcugcugggcgggaccacagugcuuccugcucacgcucag

SEQ ID NO: 397585 - RNA, 59 nt, Homo sapiens
ucuuggucaggugcuuguggagguuuagcugaugcccuuuggcuguuucuggacuaaga

SEQ ID NO: 397586 - RNA, 100 nt, Homo sapiens
guccuguagaaauguauuuugacaucauuaugagauuuaaacaaauuccucagugaauguuugguugugauauguuaaccugcaaguuuugaacauugac

SEQ ID NO: 397587 - RNA, 79 nt, Homo sapiens
guauuuuuauagcagugccccaaacuccugguaccaauuuucuguauuaggccauucuugcauugcuacaaagaaauau

SEQ ID NO: 397588 - RNA, 64 nt, Homo sapiens
acaucacuguugguacaaguaaugucaccaguaccauugucaucauuaccaucaacagugaugu

SEQ ID NO: 397589 - RNA, 58 nt, Homo sapiens
uccagggguuaggggccugaagaucuggugucugauguuugcagagcccaacccugga

SEQ ID NO: 397590 - RNA, 109 nt, Homo sapiens
caauaaaaaauacucuaugauuauagccuaugguagacuuuuuaacuugguaaaauuauauuagaugguucaccaugaguagucgcauauucauacaguggaacuauug

SEQ ID NO: 397591 - RNA, 65 nt, Homo sapiens
aaagucuuugucugguaaauccauccucugggucaucuugaggguggcauauauugauucucuuu

SEQ ID NO: 397592 - RNA, 97 nt, Homo sapiens
gaggcaggagaauugcuugaacccggguuggagguugcagugagcugagauggcgccauuguacuccagccugggcuaaagagcaagagucuguuuc

SEQ ID NO: 397593 - RNA, 68 nt, Homo sapiens
aggcuggagggguggagugcaguggugugauguuggcuuggcucacagcgacuuccgccuaccggcuu

SEQ ID NO: 397594 - RNA, 55 nt, Homo sapiens
gagcacauaugacauuuucuucuuaagaagagggaauugugucauguguauguuc

SEQ ID NO: 397595 - RNA, 68 nt, Homo sapiens
ggguacaugugcacaacgugcaggcuuguuacauacguauacacgcgccauguuagugugcugcaccc

SEQ ID NO: 397596 - RNA, 57 nt, Homo sapiens
ucuaguucuagauccuugaggauucaccacacugucuuccacaaugguugaacuaga

SEQ ID NO: 397597 - RNA, 105 nt, Homo sapiens
ucuggcuugguuucuaagagcuuuuuggcuuuuaugcagcuuagguggucuauuucaucuagauuagguauaagagcuucaaaagcuaauggcagggcugccagg

SEQ ID NO: 397598 - RNA, 69 nt, Homo sapiens
acacaguaaauauugucuccucugugaucauaauagugaugaaaaugauggugacagugaugcugaugu

SEQ ID NO: 397599 - RNA, 124 nt, Homo sapiens
gccugacuagcuaccuacuguaacaaaaucuguaucaugucuucccagugauucuauauuuugguaauauagaaucaacuuguggagaaggcagcaugauguagugaacaaagcuucagcaggc

SEQ ID NO: 397600 - RNA, 111 nt, Homo sapiens
gccauuuuuaacauuuaauauaucuuauugagguaaaacaaggauuggauugucaaaucagacugacaagauucagagcuuucuuuuacccagucacaagaaaauaauggc

SEQ ID NO: 397601 - RNA, 92 nt, Homo sapiens
auuugggucuuuauuauucagguaacuacuucugcuucagaguauuuacaauaccuuagcuggauuaguuaagccaugauggagaucugaau

SEQ ID NO: 397602 - RNA, 72 nt, Homo sapiens
gucgucgccggccuggcggagggucagguggaccacagguggcaccgggcugagcgcaggccccgcggcggc

SEQ ID NO: 397603 - RNA, 129 nt, Homo sapiens
ccagcaccugggguugggaagaugcucuccccacucucuuaggguacuuuggugcaucaacuggugcccccaugugguugcacccaggguccccaagaggcagagcucuccacacuugcguggggcugg

SEQ ID NO: 397604 - RNA, 130 nt, Homo sapiens
aggaucaucuucacuagcugucucagcauugccuuggaggucauugaugugcaacugcuggaacagucauaaacauggcugugcauacaaugccccauuugucaugcucaguuuaucugaaggugguccu

SEQ ID NO: 397605 - RNA, 57 nt, Homo sapiens
aggaggaaggggaggaugguuaacuggaagcaacuauuuguccugccuuuuccuccu

SEQ ID NO: 397606 - RNA, 56 nt, Homo sapiens
uguaggagcaaugcugauuuaguguggcccaugcuguacagauagaauguucuaca

SEQ ID NO: 397607 - RNA, 58 nt, Homo sapiens
guucucuaaaagaaacuuucaagacuuauauauaucuugaaaguguuuuaaagaggau

SEQ ID NO: 397608 - RNA, 64 nt, Homo sapiens
uuuugcauuggcugaggaguguuuccuuccaauuauguggucacuuucuagaauaagugcaaag

SEQ ID NO: 397609 - RNA, 99 nt, Homo sapiens
gccuguugcaaguggagaggcagcccugagauaggacucugcuggcucagcccuccuccugagucuugaugccucucuccucauugcuuccacucaggc

SEQ ID NO: 397610 - RNA, 62 nt, Homo sapiens
ccagucuuggauaugucuuuauuagcagcaugagaauggacuaauacaguuguccaagcugg

SEQ ID NO: 397611 - RNA, 72 nt, Homo sapiens
cuguugcuuuggcaaugucauuuucaaucauacaggaguauguguuguugaucguaacauuguagagcacag

SEQ ID NO: 397612 - RNA, 55 nt, Homo sapiens
gcccaggcuggagugcaguggcaugaucucagcucacugcacuugccuucugggu

SEQ ID NO: 397613 - RNA, 103 nt, Homo sapiens
cugaggcagaagaaucgcuugaacccgggagguggagguugcagugagcugagauugcaccacugcacuccagccuuggagacagagcgagacucugucucgg

SEQ ID NO: 397614 - RNA, 79 nt, Homo sapiens
gcugagaagagcugcugcagcuccaggccuauccuguuagguuagcaacaucagcagcaggaaaaugcuuuucucaagc

SEQ ID NO: 397615 - RNA, 82 nt, Homo sapiens
agaggaggggaauagugcugugcagugagugguacuggggguugcccuggcccacuggguagcacuguguuucucuuucuuu

SEQ ID NO: 397616 - RNA, 61 nt, Homo sapiens
ugugccaaaccuguaggggccaagagggagauuuucucuucacucacugaagguucacaca

SEQ ID NO: 397617 - RNA, 57 nt, Homo sapiens
aguccguagagcuauucagggauuugaacaucuaaucaguaaguaguuuuacagauu

SEQ ID NO: 397618 - RNA, 91 nt, Homo sapiens
ggguuacccuuggcuuggaugaagagaugguaguugccagggcauccauuccagggcaacaucagucuucaguggcaagccaaugagaucc

SEQ ID NO: 397619 - RNA, 92 nt, Homo sapiens
uguuaauuggcuugugagagacacacucaaauguucagacucuuaacagguaaugagccuugacacagugaagucucuacuugcaguaaaca

SEQ ID NO: 397620 - RNA, 57 nt, Homo sapiens
agccacgaccuucuugggagcagugaggaaucuagccugacuccagaguugugugcu

SEQ ID NO: 397621 - RNA, 57 nt, Homo sapiens
uuggccgugucauuugcuuugacucauggaaugugggugggacaaaaagcaugccag

SEQ ID NO: 397622 - RNA, 70 nt, Homo sapiens
guuuugcuuuccaucugauuuuugugucugaauuucucaguugguucugaccacagacuggaaagagggc

SEQ ID NO: 397623 - RNA, 58 nt, Homo sapiens
cagaugagaugagcauuugaauuggggggcccaauaaagaagauugcucucuccgcug

SEQ ID NO: 397624 - RNA, 59 nt, Homo sapiens
auuaaaauagaauuggaagcagaguuaggaaauuucuaaucugucaguuuuguguuaau

SEQ ID NO: 397625 - RNA, 63 nt, Homo sapiens
uguacagugucucucaguuugggaucaucugauguuauuuaaugauuagagagaggcugugca

SEQ ID NO: 397626 - RNA, 81 nt, Homo sapiens
uuacaugauuaucucagugaauguggaaaaagcauuggaaaaacuucagcauccacucaguucacugagauaaucauguaa

SEQ ID NO: 397627 - RNA, 65 nt, Homo sapiens
aaccucguauguaaugcaauauuaacucuuggaaaagaggauggaggagcauucaugacgagguu

SEQ ID NO: 397628 - RNA, 63 nt, Homo sapiens
gucugcugccuuuuauucagauaugcccugccccuagagguggaaucuagagaggcaguaggc

SEQ ID NO: 397629 - RNA, 89 nt, Homo sapiens
guagcuuccagagauuucucacauuuagcaucaugacaacucagcaucaugaggcauggcuacugcagauguagggucucuguggcugc

SEQ ID NO: 397630 - RNA, 58 nt, Homo sapiens
caucagcaauguaugaggguuccgauuucuccauauccuuuucaacacuugcuggaug

SEQ ID NO: 397631 - RNA, 73 nt, Homo sapiens
acgcugguggcuggacagaugggcucccgggucuagguugcccagcccagcccagccccucugucuccagcgu

SEQ ID NO: 397632 - RNA, 69 nt, Homo sapiens
auggucuaauagcauuuuagagcauaauaagaaugauagaguuacugucucugguuugcauuggauuau

SEQ ID NO: 397633 - RNA, 57 nt, Homo sapiens
aggccaccagguuaccggggguuuccagucugacccuaucccagugacuuauggccu

SEQ ID NO: 397634 - RNA, 57 nt, Homo sapiens
gggaggggcugaggcucaggucuguggcugcccggcucugagguugggguccuuccc

SEQ ID NO: 397635 - RNA, 75 nt, Homo sapiens
uggaaaaaggauuuaagcauuucauaugacaugauuucgugucaaacauuaugaugcucuagauuuggaagucca

SEQ ID NO: 397636 - RNA, 56 nt, Homo sapiens
gggcgagaaucggcugcucagccccauagcagcuguggcagcccccaucucugucc

SEQ ID NO: 397637 - RNA, 58 nt, Homo sapiens
ggucauguccagggacagaaaagacuggaaaauuaaguauuugccuaggcacauggcc

SEQ ID NO: 397638 - RNA, 79 nt, Homo sapiens
uaagaaacuuucugaagaacuaggugagaucuagaagcaauguccuuuuguuuauucccaguuuuuuuuaaguaucuug

SEQ ID NO: 397639 - RNA, 76 nt, Homo sapiens
acuggaagcuucaucccagaggggcacccggcuguaugagaugucaguuggccccuacugggaggugucucccagu

SEQ ID NO: 397640 - RNA, 64 nt, Homo sapiens
uuggaacacuugcacauuggugguaagaauguaaaauggugcagccaguguggcaauuuuucaa

SEQ ID NO: 397641 - RNA, 58 nt, Homo sapiens
auucaagaggaacaggcucucaucagacacagaaucugcuggugccuuguucuuggau

SEQ ID NO: 397642 - RNA, 60 nt, Homo sapiens
ugaagugccugugagcccugaucaaugugaaugaauguugucauggucacaggcauuuca

SEQ ID NO: 397643 - RNA, 130 nt, Homo sapiens
ucauuuacuaguauauauugauuuuucuaugcugaucuuauacaucgugauuuugcugaauguguuuauucaucaucacaguuguguguaauguuguaugaguguguaucaauagguauuuuaugaauga

SEQ ID NO: 397644 - RNA, 89 nt, Homo sapiens
agaacagccugucuccuaugagcuuuuuuaagccucagaauguuaaagcuggugagggacuuagaagggacuaagagacuccucguuuu

SEQ ID NO: 397645 - RNA, 60 nt, Homo sapiens
gugagccaaguucacaccauugcacuccagucuggaugacagagugagaccuugucuuac

SEQ ID NO: 397646 - RNA, 88 nt, Homo sapiens
ggccugcagcaacucuccuagcagggcccugguacagccaacuggaagcuuuguauugcucugacugauuggaugauuugcugagguc

SEQ ID NO: 397647 - RNA, 58 nt, Homo sapiens
gguuuuuuucccugacgaucggcuuugcaggcuuugugggcuuuguggggaaggagcc

SEQ ID NO: 397648 - RNA, 81 nt, Homo sapiens
aaugcaauuuuguucuguggauguauugcacagucugaaauccaggcuuuuaguguauccaugacccaaauaaugugcauu

SEQ ID NO: 397649 - RNA, 62 nt, Homo sapiens
agcaagauugauggccugcaggcaugacuuaacccuugccuggcaugguccuagguuuuguu

SEQ ID NO: 397650 - RNA, 70 nt, Homo sapiens
guuucauaacaucuuauuggcaaagauauuuaaaucugauaauaucaaguguuagggagaugugggaaac

SEQ ID NO: 397651 - RNA, 83 nt, Homo sapiens
gaauaaggcaucuauucuuggauugacuagccaaagugucgacgucaaaagcgccauuuuugguuuuauccagggucucauuc

SEQ ID NO: 397652 - RNA, 75 nt, Homo sapiens
uuagacggcuuauauuuuauccugcugagauggaggugauggccuaucugcacaggguggaaauugccuuucuaa

SEQ ID NO: 397653 - RNA, 55 nt, Homo sapiens
gcuccuucaggugguagcuguuguggcagaauagaagagugcuggacugaggagc

SEQ ID NO: 397654 - RNA, 74 nt, Homo sapiens
gcucuauaggauggaaaucauagccugauuaagacauaaaaccgacaguccccgggcaaaucuuuauccuaagc

SEQ ID NO: 397655 - RNA, 66 nt, Homo sapiens
guugcagcacacaggcugucagcugaccaggcaucgaagggcagggacugcacugugugccguaac

SEQ ID NO: 397656 - RNA, 66 nt, Homo sapiens
agaaagguuuaccucugugagcugcaucaauacaucacaaagcagucucacagacagcuucuuucu

SEQ ID NO: 397657 - RNA, 87 nt, Homo sapiens
ugcauaacuuuagcaauugauuaugccauauaugaaaauuaaacaugcaugcauacaaaagcauaauacacaguugggaagaaugca

SEQ ID NO: 397658 - RNA, 91 nt, Homo sapiens
uuuaaguauccaaugacuugagagcccauaacaucaugcccugugcaaugggcuaugacguugugggcucucaagccauccaauacuuaaa

SEQ ID NO: 397659 - RNA, 130 nt, Homo sapiens
ucccuguauuugaaauucagaacucaagcuuggcucuaaguguuuccuugcuuugcugugcuccaggggagucacugagcagaaggaagcgaguugccugagauucuucaaagccugcagcccuuuugga

SEQ ID NO: 397660 - RNA, 76 nt, Homo sapiens
ggaggcugaggugggaagauugcuugagccuaggaauucaagacuacagugagcuaugaucccaccucuguacucc

SEQ ID NO: 397661 - RNA, 60 nt, Homo sapiens
uugacaaggagugggguugagaaaagauuaggaguuuaguucugaaccuuguccuugcaa

SEQ ID NO: 397662 - RNA, 56 nt, Homo sapiens
ggagguagagguugcagugagcugagauuguguuauugcacucugaucugcacucc

SEQ ID NO: 397663 - RNA, 87 nt, Homo sapiens
gaguuucccucuuguugccuaggcuggagugcaguggugugaucucagcucacugcaaccuccaccucccagguucaagcgauucuc

SEQ ID NO: 397664 - RNA, 81 nt, Homo sapiens
cucuaguucccugaaguguuacucuagauugucuguuugugcuuuuucagacuuuuugauguaggcauuuagggcuaugag

SEQ ID NO: 397665 - RNA, 96 nt, Homo sapiens
ugaguuuuugucuucaugaauuuggugagaaaucaguuguuuauuuuaugaagguuuuauuauaggcaacgcuucuuucucagguucugacacuca

SEQ ID NO: 397666 - RNA, 128 nt, Homo sapiens
uaaaguuuuccagaccgaggaaaagguuaucuauuugucuacagcucuggagcuuuuggcuagugcuucuggguucaaaaucucuuagcugugucuccgcuuaaggauaacucuccugggauucuuua

SEQ ID NO: 397667 - RNA, 57 nt, Homo sapiens
gagccaggagaugcaggaagacuggguccuucgcccuucacuggagucccuggauuc

SEQ ID NO: 397668 - RNA, 76 nt, Homo sapiens
uucuauccugggagaggcaaguugagaaggcuagaggcuacagaacccgucucagcagucacuccuaugacaaggg

SEQ ID NO: 397669 - RNA, 82 nt, Homo sapiens
uucucuuggagccaguacuacuuucucuucugggaaauucugcucuugaauuucccuacuaguuagugugacuucaagagga

SEQ ID NO: 397670 - RNA, 60 nt, Homo sapiens
gagaaugaugauuuccagcuucauccaugucccuacaaaggacaugaacucaucauuuuu

SEQ ID NO: 397671 - RNA, 59 nt, Homo sapiens
aguggcaggcagaccacagaugacuuuccaguuuuguuauuugguggcugugugacacu

SEQ ID NO: 397672 - RNA, 130 nt, Homo sapiens
uacaggcaagagccacugugcccagccuuauaagguauuuuugucuauaucuuauagauagaaaaacuaauguuuagaaagauacuuaaaaguccuuaagauaggccaggcacaguggcucaugccugua

SEQ ID NO: 397673 - RNA, 75 nt, Homo sapiens
uggcaggcagaugagguccucagcugcuggcccagccuggcagggcggcugcagcccucaucagcccucgcgcca

SEQ ID NO: 397674 - RNA, 67 nt, Homo sapiens
augucugagauaggauucacuuucaugucuuuauucagggcacagagugcuagucccaucuggauau

SEQ ID NO: 397675 - RNA, 58 nt, Homo sapiens
gucuguaaucccagaacuucgggaggcuaacaaucacuugaggucaggaguuacagac

SEQ ID NO: 397676 - RNA, 79 nt, Homo sapiens
cacagcccauccuugcaauacguucuccuuugccugaagcaugcuggaaagacuauuguaaaggauggcaucaguugug

SEQ ID NO: 397677 - RNA, 79 nt, Homo sapiens
cuuccugccuagagaguuaucaggcuguggcacagggagaaagaacugggcagagccugggggacuuucuggaaggaag

SEQ ID NO: 397678 - RNA, 61 nt, Homo sapiens
guccauggagacacauuuuauauauaagauacauuucaguauauagagugugucuguggau

SEQ ID NO: 397679 - RNA, 64 nt, Homo sapiens
gacauuuucaauacacaugcagcuacuuuucccuaaaauagcacugcuaugguuugaauguguc

SEQ ID NO: 397680 - RNA, 63 nt, Homo sapiens
uugauucguguauauucaaccuugcauccuagggaugaagcuaacuugauugugauggaucaa

SEQ ID NO: 397681 - RNA, 76 nt, Homo sapiens
cugcacucuccuauaaucacuagcauuuuuaucauucuccucacauagaccaagugcucuugugggaagagagcag

SEQ ID NO: 397682 - RNA, 56 nt, Homo sapiens
gggagagaugcugauugccaaugucuuauuuccuuuggcaagguagcauuucuucu

SEQ ID NO: 397683 - RNA, 67 nt, Homo sapiens
auagagccacacucuccuaacucauagcagugaccucagcauugagauuaggggugugugucugugu

SEQ ID NO: 397684 - RNA, 76 nt, Homo sapiens
uagguuggugcaaaaguaauuaugguuuugcuauugaaaguaauggcaaaaucgcaauuacuuuugagccaaccua

SEQ ID NO: 397685 - RNA, 61 nt, Homo sapiens
guugaucuguuguuuggaaguaucaaccaacacagguuggugcuucaucacggaggucaac

SEQ ID NO: 397686 - RNA, 71 nt, Homo sapiens
uguauuagaguggguaguuaggcaggcaugagcugauagucaagugauuguuaaacugccucucuaaaaua

SEQ ID NO: 397687 - RNA, 60 nt, Homo sapiens
aaguugcaagauguucaugggcuguuuugauaauagagagaacacgugcaucugcaauuu

SEQ ID NO: 397688 - RNA, 85 nt, Homo sapiens
gugcuaucuggagcuacugugauaggaacuguguguaaagaagacugcuuacagcacugugcauagugguucagacuauggacac

SEQ ID NO: 397689 - RNA, 66 nt, Homo sapiens
ccagaggucucuccaucuggacuaggcggccggucaggcucuucuuccagccuugaggggcccugg

SEQ ID NO: 397690 - RNA, 129 nt, Homo sapiens
agaaaauaaaguaucaagguaacaauuagcaugaugacuggaacggcacuuuacaucuuaauauuaacagugaauguaaauugcuguuccagucaucaugcuaauuguuaccuugauacuuuauuuucu

SEQ ID NO: 397691 - RNA, 76 nt, Homo sapiens
uuacagauuugggguauaugcuaaaguuaccaaaguuguagaaaauaaggccgggcauuguggcucacaucuguaa

SEQ ID NO: 397692 - RNA, 86 nt, Homo sapiens
uaaguucuaggguacaugugcacaaugugcagguuuguuacauauguauacacgugccauguuggugugcuguacccauuaacuug

SEQ ID NO: 397693 - RNA, 114 nt, Homo sapiens
ugaugagauuugaauauauggagugcgaggugcuuuugauucauacaaguaggcagugaauacagguaugaaucugagagaucuggaaugugaagauaggcuugggaaucauca

SEQ ID NO: 397694 - RNA, 58 nt, Homo sapiens
gcagucaacuuuugcuuugagcccugauaaauacaucaccccuaaggcaagagucugc

SEQ ID NO: 397695 - RNA, 73 nt, Homo sapiens
ggcaaggcacauagcagggaaacccauucuugauaacaacgcagugaaucuguuuucuucuguucuuauugcc

SEQ ID NO: 397696 - RNA, 84 nt, Homo sapiens
gugaaaaaguaacugcacauauuuguaugggucuauuuuggguucuccauucugcuccaucaauguaugugucuauuuuaucac

SEQ ID NO: 397697 - RNA, 110 nt, Homo sapiens
auucauguggccccuggacuaacuggaucgauuccaaauguagaucuuccaaaugaaacugaagacauugaauugaauccagauuuuacaggggaauagcuaaaaugaau

SEQ ID NO: 397698 - RNA, 62 nt, Homo sapiens
ccuacuugauaaugcuaguuuaugcuaagaaaacauuuucauauagaccauugguagguagg

SEQ ID NO: 397699 - RNA, 71 nt, Homo sapiens
agauagagagcuagcugggugaucacugggaauuuagcaacuuuuccaugagaauaguuaggcucuuaucu

SEQ ID NO: 397700 - RNA, 79 nt, Homo sapiens
ugcuuuaaguuccaggguacauguguacaacaugcagauuuguuacauagguauacaugugccauguugguuugcugca

SEQ ID NO: 397701 - RNA, 62 nt, Homo sapiens
cccagagccucuucaaaacagagcccugacaauuaggcagucugaguuuugaaaggcuuggg

SEQ ID NO: 397702 - RNA, 97 nt, Homo sapiens
uucuggccccaacaauauauaagcugaugagccacaaugauauauaaaaccugucaaccaaguauuugugaaucagcuguauagauuguuggcagga

SEQ ID NO: 397703 - RNA, 57 nt, Homo sapiens
cuuuacacauccuaaccaguguccaggaugauuccagcacaggggaggagugugaag

SEQ ID NO: 397704 - RNA, 66 nt, Homo sapiens
aaugacagugcuaaagaacccuccuuuacaaacuccucuaccugggacuuucuuaagcacuuuauu

SEQ ID NO: 397705 - RNA, 103 nt, Homo sapiens
ggaugguaagagcacagccacggcaguguggugcggucaggaggcagcauccauccuagcugcacugccgcacucccggguccccugaucccuagaccaugcc

SEQ ID NO: 397706 - RNA, 123 nt, Homo sapiens
guggccaaacugggauucagacccagggcuguuugguaccacccuuuuuccagaagccgggcaagugucaggccggcuugcuggcaggggucggugggcucugggucccuucccugaagccac

SEQ ID NO: 397707 - RNA, 73 nt, Homo sapiens
caccaucucagagaaaauuacuaagauuuggacauaguuccuuucaucuucuugguuuuucuuuguaugugug

SEQ ID NO: 397708 - RNA, 89 nt, Homo sapiens
uuuuccacagcagcuugucaagagcuuuaucuuuucucccaucuguuuggauuggauacuuaacagcucuacagcugcucuuuggagga

SEQ ID NO: 397709 - RNA, 80 nt, Homo sapiens
uuaaaggacuuaauucuuuuuugaguuucccuuucuacuauucauugaggaugagauaacuacuggauuaaguuuuuuaa

SEQ ID NO: 397710 - RNA, 129 nt, Homo sapiens
ucugguguacugcugauuuuuccaaguaaggguaaacaaguauggacucucuuuaugaaauggaaugccaaagaaggcugagcagagaucuauuacugugaaccacuugaaaucaguggguacauuagg

SEQ ID NO: 397711 - RNA, 58 nt, Homo sapiens
auugaauguaugcuggguuuacugagugcaaaccacuguaguucacccugcauuuaau

SEQ ID NO: 397712 - RNA, 55 nt, Homo sapiens
guguccauguguucucaucauuuagcucccacuuaaaagugagaacaugugacau

SEQ ID NO: 397713 - RNA, 74 nt, Homo sapiens
ucgcuauaucacccaggcuagagugcaguggcaugaucauagcuuacugcagucagacuccugggcuccagcga

SEQ ID NO: 397714 - RNA, 67 nt, Homo sapiens
gagaugagcucauaaagagugauuuggggugcucuccucauaccaggcauucucgugaacuccucuc

SEQ ID NO: 397715 - RNA, 61 nt, Homo sapiens
guugccuaggcuggagugcagugacuauacugcauccaugaucuccuggccucaaagcaau

SEQ ID NO: 397716 - RNA, 71 nt, Homo sapiens
ucuaagaauucauuuauaagccucaguaguaaaucuaugaaugcuguauggcuugcaugacuucaauuaga

SEQ ID NO: 397717 - RNA, 59 nt, Homo sapiens
ugaguggagaucgcaccauugcacuccagccugggugacaagagugaaacuccaucuca

SEQ ID NO: 397718 - RNA, 56 nt, Homo sapiens
guguuuccucuuguuauugauuucuacuuuuauguaaucguggccugaggagauac

SEQ ID NO: 397719 - RNA, 56 nt, Homo sapiens
acuauggguuuuugucuguuuacucugugcagagcugagggguggggaccuauggu

SEQ ID NO: 397720 - RNA, 68 nt, Homo sapiens
guagaaagagaagcagugaggugcugucaguugugggaguagcacagggaauugguucucuagucugc

SEQ ID NO: 397721 - RNA, 65 nt, Homo sapiens
gaaaguuuagauuuuguugcaccacaguuauuuuaauggcuguaauguaaugagacuacauuuuu

SEQ ID NO: 397722 - RNA, 59 nt, Homo sapiens
cugggguaggacuggcuuuugacaauggauuuauccauauggaguuguuucugccccag

SEQ ID NO: 397723 - RNA, 73 nt, Homo sapiens
gugauuuguugugcuuaagccuauugauugccuguaaucccagcacaaugggaggccgaggcaggcagaucac

SEQ ID NO: 397724 - RNA, 58 nt, Homo sapiens
uuggugaaaugaaagcugcuuggaucaggacagauuagaguggcuuuuguuucaccag

SEQ ID NO: 397725 - RNA, 67 nt, Homo sapiens
uugaggaggcagucucuccauucucagaucucaaacucugugcugggagaaccacugcucucuucaa

SEQ ID NO: 397726 - RNA, 63 nt, Homo sapiens
uguuagcuauggccauuacuaagaauguuuuauuaaacacccacuaggauggcuaugaugaca

SEQ ID NO: 397727 - RNA, 102 nt, Homo sapiens
ugaggcaagagaauugcuugaacccgggagguggaggcugcagugagccaagaucacgcuguugcacuccagccugggcaacaagagcaaaacuccgucuca

SEQ ID NO: 397728 - RNA, 84 nt, Homo sapiens
aguacauuguaauuugaucacauuguuucauacauauucugggacauccuaaaauuguacaugcagugagucaucuuacgugcu

SEQ ID NO: 397729 - RNA, 119 nt, Homo sapiens
gauauuacuccuaauaucacaguggguguacacucugugguauuauuuguacuauccuagagagauaaugcucccaguaucacaguggguguauacccugugauauuauucauaauauc

SEQ ID NO: 397730 - RNA, 89 nt, Homo sapiens
gggcaccagccaaagcacagcuuauuuuaugccauuaccgcuauuggaauaguacaaaaugugccuacagugggcuguuggaccugcuc

SEQ ID NO: 397731 - RNA, 73 nt, Homo sapiens
uucuuaguggaguauaaauuauuaggaucauuuaguuuuaugccuagauuaucccugauuuguccacugggag

SEQ ID NO: 397732 - RNA, 55 nt, Homo sapiens
auggaguguucugaauccuuuguugucauuucaacaauguucacagcaucuucau

SEQ ID NO: 397733 - RNA, 58 nt, Homo sapiens
ugacaagugcaaauguaaagugcagugccaucuuccauugcaguguccucacuuguca

SEQ ID NO: 397734 - RNA, 58 nt, Homo sapiens
uggacugagauuucagcugccacccauggcagguggcacagcuugcaauuuaagucua

SEQ ID NO: 397735 - RNA, 83 nt, Homo sapiens
ggguggcagcuggguucagagugggcugcggcccuccauaugugaguuucugggcuucaucccucaaacuccagcaaccauuc

SEQ ID NO: 397736 - RNA, 66 nt, Homo sapiens
gugucagaaucugagacgacaacauuaggugcucgcaccugacguugucaucugagauucugacac

SEQ ID NO: 397737 - RNA, 77 nt, Homo sapiens
gaugcucacaagaaguugcaccguacucauggcugagcagaucaaggcuagagaauagugccacuaaaaugggcauc

SEQ ID NO: 397738 - RNA, 81 nt, Homo sapiens
cucagcaaaccaacgaguuucuauuaauaucucauggcuagaguucugagauaauagcuauaggaucuuugguuguaugag

SEQ ID NO: 397739 - RNA, 70 nt, Homo sapiens
cuguauguucaggcagaaguuugcugcaggggcagagcccucauggagaacuucugcuagggcagugcag

SEQ ID NO: 397740 - RNA, 93 nt, Homo sapiens
guugcauuuauugugacacgggguauguuccuuuugauauuauccauaauguccuagagggaugucaccccuuaugucacaggguuuguacac

SEQ ID NO: 397741 - RNA, 77 nt, Homo sapiens
cuuuguuauuguaauguuaccaaaugguguuuugccucaaagaguggcaagaaucauggaaagcaugcaauucaaag

SEQ ID NO: 397742 - RNA, 70 nt, Homo sapiens
agaacacuaguauuccuuuugcauuuccacauagcuauagagugagaagauaaggggauaauggcguuuu

SEQ ID NO: 397743 - RNA, 69 nt, Homo sapiens
gaggugguucaucaggcuuucucuagagagugaccugcuuuuguggaugaauguuuggauguaagccuc

SEQ ID NO: 397744 - RNA, 127 nt, Homo sapiens
uucagccaguuucaggaggacugguaucauuagugcaaaagugauugcgguuuuugccauuacuuucaauggcaaaauccacaauuacuuuugcaccuaauaguucuuccuuguacaucugguagaa

SEQ ID NO: 397745 - RNA, 129 nt, Homo sapiens
ucaguuaugaggacuuuuucucugcccuucgucaauaugcagccugugaacagcgucugggaaaguaguggucauugguugcguaauuugauuugaggcuuguggaggaaaggacccaagugacucuga

SEQ ID NO: 397746 - RNA, 63 nt, Homo sapiens
uugauuuugacauuucaguuugcuaacccaauacaaugguagacugaaguaucugagacucag

SEQ ID NO: 397747 - RNA, 68 nt, Homo sapiens
uucaaggugagauuugggugaggacacagaggcaaaguguaucaccuugagagaccuuauccuuugag

SEQ ID NO: 397748 - RNA, 80 nt, Homo sapiens
gucacaugcccgacccaaagccaaucacgguggcagaggaagcagagguguugugauuggccuggcgugggucaugugac

SEQ ID NO: 397749 - RNA, 55 nt, Homo sapiens
uugagaucaugcuacugcacuccagcuugggugacagaguaagaccuggucucaa

SEQ ID NO: 397750 - RNA, 63 nt, Homo sapiens
gauacaccauuuucuagcuauuagauucgcaaggauauuacugaguuggcaagguugugaauu

SEQ ID NO: 397751 - RNA, 57 nt, Homo sapiens
uugugcuaauacauacagugcuacaaaaacaaugugaugcauaagugauuagcacaa

SEQ ID NO: 397752 - RNA, 84 nt, Homo sapiens
agguaaaagcuauaauucuccuugccugauagcaaaguugcaggcaagaagaacuauaacuuuuuaaaauuaucaacuagaccu

SEQ ID NO: 397753 - RNA, 57 nt, Homo sapiens
uugaaagaacuauguuguauaccuggucaaauaagguacauaaccuggugcuuucaa

SEQ ID NO: 397754 - RNA, 66 nt, Homo sapiens
uagauuuugguuuuuugcaaucauggucacagaacugugagacugaaauuaggaaacugaaauuug

SEQ ID NO: 397755 - RNA, 81 nt, Homo sapiens
ccaggaauggacuuuuuguucagugucuccuuucauccucuuugaagagaugcaaauuugaacagacagugucgcuguugg

SEQ ID NO: 397756 - RNA, 81 nt, Homo sapiens
ggaaauaaugacucuguucaguaguucauucauuuauucaugugauaaauauugacugacugcuuaacaguauguuguucu

SEQ ID NO: 397757 - RNA, 89 nt, Homo sapiens
uugcccuauugcauggcuuguauaagauucucaucuguccauccaaaucacagauuugagggcuucuaccagaacaugaagcugggcaa

SEQ ID NO: 397758 - RNA, 122 nt, Homo sapiens
ggcuggucugauuucuagguccuucucccagggcauguggacuuguauguuugacugaaguuccauaagccaaugcuagcccacaugcaagggugacagccaccacuuagccaucacuagcc

SEQ ID NO: 397759 - RNA, 78 nt, Homo sapiens
agcaauuguauagaucguagaccaauaaaaguuuuuucagguuggaguauuuuauuacugcauuuguuuauaauugcu

SEQ ID NO: 397760 - RNA, 76 nt, Homo sapiens
caggggcuuucucccucacaaagcauucucuucauggaaggaugaugaaguaaaucuuaugucagggagccaccug

SEQ ID NO: 397761 - RNA, 67 nt, Homo sapiens
gauaguggaguguaaagcgucuuuuucagacaguuuucugcaggaguggcuauuaagcugcaguguu

SEQ ID NO: 397762 - RNA, 90 nt, Homo sapiens
ggguuauacguauuuaggaaaucucugaggcucccuuccugcucugcucgagcuggagcgagugcucaaguuuucucacccuaaugaccc

SEQ ID NO: 397763 - RNA, 94 nt, Homo sapiens
agaaagacuuugaaccuaguagaggagaggaaggaauuguucaaacauaacuuuaaccuucauuccuuucccugccaaggucccaggucuuuuu

SEQ ID NO: 397764 - RNA, 60 nt, Homo sapiens
uuaugguaaucucggcuuuuuuggucuaguagauuuuagaugaguugggguuuacuguaa

SEQ ID NO: 397765 - RNA, 59 nt, Homo sapiens
guaugaugcugagguuuggagugcaaacaaucuugucacacagauaguaagcauaguac

SEQ ID NO: 397766 - RNA, 63 nt, Homo sapiens
cuugggguuuuucuuuacagcaauucaaccaaugaggggaugaaugugaagaaaugcugcaag

SEQ ID NO: 397767 - RNA, 55 nt, Homo sapiens
cuggcauuacaggcgugagccaccgugcucggcugcaaacauccuuugaugccag

SEQ ID NO: 397768 - RNA, 57 nt, Homo sapiens
uacauuugaugauugccuuucauacugaguuaggaggugaauguaauuacagaugua

SEQ ID NO: 397769 - RNA, 85 nt, Homo sapiens
uuaacuggcauagcuauuagguuggugcaaaaguaacugcgguuuuugccauuacuuuuaaaucaaacuacaguaggccucuuaa

SEQ ID NO: 397770 - RNA, 66 nt, Homo sapiens
gaacaauaucugccuuccgcauagaaguuugaauuaauuuaaacucuguagcagagacagauguuc

SEQ ID NO: 397771 - RNA, 72 nt, Homo sapiens
gcuugagcccaggaauuggaggcugcagugagcuacgaucgugcuauugcacuccagccugagcaaaagagc

SEQ ID NO: 397772 - RNA, 66 nt, Homo sapiens
ggcaggugagagcucuuugaaaaugaaaacauucugcuauuugaaugcaaaguguucuucuuugcc

SEQ ID NO: 397773 - RNA, 79 nt, Homo sapiens
aggcuggagugcaguggugugaucucggcucacugcaagcuccuccucuuggguucacaccauucuucuacuucagccu

SEQ ID NO: 397774 - RNA, 75 nt, Homo sapiens
cauggagguagugagcagcugaacuagaaauggaaccaaaugcccugguucuaguccucgacccuaaccuucaug

SEQ ID NO: 397775 - RNA, 57 nt, Homo sapiens
gaauuuugugggaccagagggcagacuuauggguuaaauuguguccccacaaaauuc

SEQ ID NO: 397776 - RNA, 81 nt, Homo sapiens
uuuucauuuaugucacuugguuuggugcuacacauagaucaaaggcuuuggauagcauggauaucagcgacaguuugaaga

SEQ ID NO: 397777 - RNA, 106 nt, Homo sapiens
uggagccuacugaguugaagaaaugcuuaucaacccugacacaagcagaauuuuaggccuaacaauucuuuguuguggggggcucuucugugcaucagaggcuuua

SEQ ID NO: 397778 - RNA, 65 nt, Homo sapiens
auaauguaccuuugcggcaaucacacugcauuuugaaugugcaauggcaacgaggugugcauuau

SEQ ID NO: 397779 - RNA, 94 nt, Homo sapiens
uguagacucagagcaauaggcaauaccauauauucuggguguguaguaagcuauaccaucuagauuuguguagguacccucuaugauguuugca

SEQ ID NO: 397780 - RNA, 73 nt, Homo sapiens
ugcgcgucggugugaagagaccaccaaacaggcuuugugugagcaacauggcuguuuauuucaccugggugca

SEQ ID NO: 397781 - RNA, 130 nt, Homo sapiens
aauuuaauuauauaauacuuguuuauucaucagcaauauuuaagauguaugugagcuagaaaaauuuaauuauggaucuuugauuagacugauggauaauauuuucuuuuuuuuuauuauacuuuaaauu

SEQ ID NO: 397782 - RNA, 98 nt, Homo sapiens
caucauuauuauuugcccuuccuuaccuuccucacagguuugcugaaaccauuaaauaaaguaggaggugaggaaaucggaagaauacaaggaugaug

SEQ ID NO: 397783 - RNA, 78 nt, Homo sapiens
ggcacggcgaccuuaagucccuuguccagggccccacagauggggagacugaggcacggcgaccuuaagucccuuguc

SEQ ID NO: 397784 - RNA, 58 nt, Homo sapiens
cucagcuucuaccuccugagugaaaccucuucaucuuccucaccagguguaggcugag

SEQ ID NO: 397785 - RNA, 57 nt, Homo sapiens
guggguaaaucucuggggcucucagaucugaaggcugugagaccccugauuucccac

SEQ ID NO: 397786 - RNA, 76 nt, Homo sapiens
ugguuuuuccauguugauacgugaaguucuaguucauuuauguggauggcugcauggugucccaugggauaaacua

SEQ ID NO: 397787 - RNA, 60 nt, Homo sapiens
augccacccaacauguucacauguucugagaauuaaaauaugaacacuuuugggaggcau

SEQ ID NO: 397788 - RNA, 127 nt, Homo sapiens
caugauuguguuuugaaaugugaggacaugagauuugggaggggccaggaguggaaugauaugguuaggcuuuguguccccacccaaaucucaucuugaauuguaguccuauaauccccacaucaug

SEQ ID NO: 397789 - RNA, 129 nt, Homo sapiens
cauguaacuuauuugugccuucaggaccugcucaagccugucauguauauaccacuuccauuugaugauggaaugcugcugugcaggacccaccuaauggcuagauaggucgaaagcacccaguucaug

SEQ ID NO: 397790 - RNA, 77 nt, Homo sapiens
uaguuauacugagaaugaugauuuccaauuucauccaugucccuacaaaggacaugaacucaucauuuuuauggcug

SEQ ID NO: 397791 - RNA, 87 nt, Homo sapiens
aucgugcuagcaaauacuaggucuuauucuuuuuguuuggagauagagucuugcucugucauccaggcuggagugaagcggcacgau

SEQ ID NO: 397792 - RNA, 122 nt, Homo sapiens
uauuaauugcacugugguuuaguaagggaauaagaugauguucuuuuucuuaggagaucuaugaugaaguauuuuaagguaaaggaacaucauaucuacaaccuacucccaguaguauagua

SEQ ID NO: 397793 - RNA, 115 nt, Homo sapiens
aagaugaaaucuuacaagucuuuuucaugucuucugagggcugagauauaacuuugaaguagagcccaaacaugaagaucaugaagacggcuucuucuccaaaugauguuaucuu

SEQ ID NO: 397794 - RNA, 56 nt, Homo sapiens
gcugccuugccaggggcagaaacaaauagauggagaaguccccugagcgaugcagu

SEQ ID NO: 397795 - RNA, 129 nt, Homo sapiens
aguaguaauaggaaacuuagucuuauauccaauuugguaccaagauauaugaauagauuuauuacuauuauauaucuagagcggaccaggcuugcuuguagguuaauugcuuaguaccuguguagugcu

SEQ ID NO: 397796 - RNA, 66 nt, Homo sapiens
cgcuugaaccugggaggcagagguugcagugagccaagauugcaccauuacacuccaggcugggug

SEQ ID NO: 397797 - RNA, 83 nt, Homo sapiens
cucaggaggacaauauggagacugaucccucuuuccucuccucugaggaggucgaggaagcucucagcucucuuuccccugag

SEQ ID NO: 397798 - RNA, 56 nt, Homo sapiens
uugagauggagucucacucuuguuaccuaggcuagagugcaauggcaccaucucag

SEQ ID NO: 397799 - RNA, 56 nt, Homo sapiens
auuugcgaggucauggcaauacacauuuucuuaaauguggcaauggccucacagau

SEQ ID NO: 397800 - RNA, 66 nt, Homo sapiens
ccugacucugauuucgcugcauaacucccaggggcauccugcucugaugucaggaagggagucagg

SEQ ID NO: 397801 - RNA, 73 nt, Homo sapiens
cuggucuggagagugauaaguaaauggagaaauaaucaguuuuacucuagaacuagaucaccucaacagucag

SEQ ID NO: 397802 - RNA, 101 nt, Homo sapiens
guggcacauggaaugccagugagacagaaccauucacuccccuggaaaggcgucuaaagccagggagccaaguggucuagcucagcguaucccacccccac

SEQ ID NO: 397803 - RNA, 94 nt, Homo sapiens
gcuuugcgcuaauggacuguuauaaaaugcacaguuguuucuugcagucacugccaaaugccucccauucuacugacaguuuugugcauuaggc

SEQ ID NO: 397804 - RNA, 69 nt, Homo sapiens
uugggguagaauugcaacauauaaauuuugggggaacacaaguauucagaucauagcauucugccccag

SEQ ID NO: 397805 - RNA, 67 nt, Homo sapiens
caucagauugagaucaucuaaguagacaucagauugaguaaaaguuucuuagaucuggauucuggug

SEQ ID NO: 397806 - RNA, 75 nt, Homo sapiens
uuagaauucaacaguaaagcauuuuuaaguggcuacauggcuauucuaaaguuuuauuuauugugucaauuuuga

SEQ ID NO: 397807 - RNA, 55 nt, Homo sapiens
aggucuguuugcuguuuucuccaaugaaaugguucuggguaaacagcagacgccu

SEQ ID NO: 397808 - RNA, 94 nt, Homo sapiens
gaugugcagaugagauacaucuaugugucuguguauguaugaugugauuuggauguguaugggcauauggaugugugucuauaucagguauauc

SEQ ID NO: 397809 - RNA, 87 nt, Homo sapiens
uccguucuaugucucucauuuuccuccuaugggagcccagacacauucuucucauggugauggcaaaaucacaagacaguagacgga

SEQ ID NO: 397810 - RNA, 67 nt, Homo sapiens
ggaccugagggaaaaaauuuauaugagcugacgaaaauguugauggagagaauuauucucucagucc

SEQ ID NO: 397811 - RNA, 79 nt, Homo sapiens
caucuguuuauuuucauggcgaggcuucauggggacgggaacaaguccuugaugagcgccugccagagcugggcaggug

SEQ ID NO: 397812 - RNA, 82 nt, Homo sapiens
uuugcguaucuauguguuuuauggucagggagauggggaauaucuguuugucuccgcuaugguagcuaugguauuauguaga

SEQ ID NO: 397813 - RNA, 57 nt, Homo sapiens
uucuacaucagagacuucauacuggugucaaaccuuaugaauguaaagaauguggga

SEQ ID NO: 397814 - RNA, 74 nt, Homo sapiens
gucuuuaucagcagcaugaaaagcaacuaauacaguaaauugguaucaguugagugaagugcuacugauaagau

SEQ ID NO: 397815 - RNA, 87 nt, Homo sapiens
ggcaccaggggauuuaauagcaaagaguuuagacucaagucauccuugguucaagucuugccucugcuacuuagcaucccggugacu

SEQ ID NO: 397816 - RNA, 121 nt, Homo sapiens
uauuauauaucccugaaaucuaaaguggauaacacauguggagagagaaugacuuaucugauuaaaagaaugaugucauuuuaauuucuaaucaauguguugguuacuaggauguauagua

SEQ ID NO: 397817 - RNA, 90 nt, Homo sapiens
gugggcacagauggaguggaggccaaguucuuuuggugagauaguuuccugcuaagauucaucaguugagcugguugcuucaguucccac

SEQ ID NO: 397818 - RNA, 60 nt, Homo sapiens
uagcaauuccuuucccucagacaaauaucugcuggugugcagugaggaaaggguuugcua

SEQ ID NO: 397819 - RNA, 63 nt, Homo sapiens
gcgaaugugggaguccacugcccggcagauggagagagccucugcggguguggacccuagugc

SEQ ID NO: 397820 - RNA, 92 nt, Homo sapiens
ucuuuaacuucagcacuugaugauaugaguagucgcauugaugaucuggaaaagaauaucgcggaccucaugacacaggcugggguggaaga

SEQ ID NO: 397821 - RNA, 67 nt, Homo sapiens
uugagccuaugugugucuuugcauugugagaugggucuccucaauacagcacacagaugggucuuga

SEQ ID NO: 397822 - RNA, 63 nt, Homo sapiens
cugaggauauucagccucugugguucauuuaauucacacaacacacuggcuguauaucuuuag

SEQ ID NO: 397823 - RNA, 126 nt, Homo sapiens
guccucauccgcccuccuccuccucgccggccugagugagguucuacucugugaccuagugccuucuuguuacagcggaagccaucaccuggaugccuacgugggaagggaccucgaaugugggac

SEQ ID NO: 397824 - RNA, 96 nt, Homo sapiens
caguagggucacuuagcuguaguguggaacucaauacaacgcaugcuccguucagcuguuuugucgagcuuuucagaaaacagcaugaccuuacug

SEQ ID NO: 397825 - RNA, 64 nt, Homo sapiens
uugcuuuuugcuauuuugagucuauucugcagcauagagguauaccaaaaaggcaucugagcag

SEQ ID NO: 397826 - RNA, 56 nt, Homo sapiens
aguaagcacuauguugcuuuguuaaauuaaaugauagaucauauucagugcuuacu

SEQ ID NO: 397827 - RNA, 83 nt, Homo sapiens
cuguugcuuauuacauccauaggcucugcuucuacuaacguccuugaaccuuggagcagagccuauggagguauuaaggacag

SEQ ID NO: 397828 - RNA, 130 nt, Homo sapiens
aauacaguggguccuagccacguguggcuaucaagcaccugagauguggcuagagagguugaggaacucaauuuuuaacuaaucuacaucuaaauuuauauagccacauggggcuagaggcuccuguguu

SEQ ID NO: 397829 - RNA, 61 nt, Homo sapiens
ucugcaaaauauaagccagauuaagcaaauuccugaguaguacuggcauguauuucccaga

SEQ ID NO: 397830 - RNA, 70 nt, Homo sapiens
gggcuuucaccuggagccuucacauucuggggcugccagaagggguggccagugugacuuugaggggccc

SEQ ID NO: 397831 - RNA, 57 nt, Homo sapiens
ugcugguuuucaucaucaguggccuugucauccuggccuacugcucccaggccagca

SEQ ID NO: 397832 - RNA, 130 nt, Homo sapiens
ccugggcucaagugauccuuccaccucagccucucaaguaacugggacaauaagcaugcaccaccauacucugcucauuuuuauguuuuuuguagagacguugcgggggcgucucacuauguugcccagg

SEQ ID NO: 397833 - RNA, 58 nt, Homo sapiens
gucucuaccugcacaugccuuauagcaucagcaguagggcuugugaucagguguagau

SEQ ID NO: 397834 - RNA, 127 nt, Homo sapiens
aaagaaaauaaggaagauuuaaacgaguugauauguacagcucucuaggauagguaaagaaaaccaaaucacagaaacguacauauugcaugaauuugucuauggauuuuuuauuuuuauuuuuuuu

SEQ ID NO: 397835 - RNA, 71 nt, Homo sapiens
ucuuuauagcagugugaaaauugacugauauaggaauucuguaccagacgaguggagcacugcuauaaaga

SEQ ID NO: 397836 - RNA, 78 nt, Homo sapiens
cgggaagaagaaggugaccuguguccuguaggaguccucaccaucauuucucacagucacugucacguugaacucccg

SEQ ID NO: 397837 - RNA, 101 nt, Homo sapiens
aaggaaugaucaacuaaaucaaauguugcuaagucaagagaaaugaugacuauugagaaauuaacuugagauuuagcaauaugaagaucauuggugaccuu

SEQ ID NO: 397838 - RNA, 88 nt, Homo sapiens
gcagugacccuugcugauaaaccuguggauuuugguaucugugggaggucccagaacaaaucccccaugggcaucaagggaaaacugu

SEQ ID NO: 397839 - RNA, 68 nt, Homo sapiens
uauuuggauagucuggaaaaaaaucagcagaaaaugucacuuugggcuuccuccauuuuguccaaaua

SEQ ID NO: 397840 - RNA, 80 nt, Homo sapiens
ucugcauaauaggugcuugaggaacggaggcuguguguuucugcacgccagcccagugcauuuguguacucacauguaga

SEQ ID NO: 397841 - RNA, 72 nt, Homo sapiens
gggagaggagaaaggcaauuuguugugaggauuuucauccugaaagccuuuaaugaauuguucuuugcuccc

SEQ ID NO: 397842 - RNA, 72 nt, Homo sapiens
ucauuucccaugcuuauuccuuugcuauuauuuaagguuuggugaugaaguauaggaagggcuuggaaauga

SEQ ID NO: 397843 - RNA, 94 nt, Homo sapiens
gcagcuggggcucugcagagccaugggguagguagcucggggaaccaggcuggucucuucgagcuugcuucuuuugggugugcucuccagcugc

SEQ ID NO: 397844 - RNA, 92 nt, Homo sapiens
acauccuccuggcguaugaggaguauaacccggugaguauucccggcagugagguucccgggccauauuuccauauucacaggagugggugu

SEQ ID NO: 397845 - RNA, 105 nt, Homo sapiens
gcuagucaaauaucuccagaaguaagguagcugagugaagugguucauaaucuuuccaugggagccaaauccucggugcugugacucuuuuagauaaaugauagu

SEQ ID NO: 397846 - RNA, 55 nt, Homo sapiens
agcagguauucgggucaugggggcagaucccucaugaacagcuuggugcucugcu

SEQ ID NO: 397847 - RNA, 97 nt, Homo sapiens
uauauuugacagguuucuauaugggucuaauuauucugauauuuuugguccuucaaaagugaucauuugaauugaugaugugguauuugucuauaua

SEQ ID NO: 397848 - RNA, 62 nt, Homo sapiens
uucauuauguuaauuugacauaucauguuuauugguuugauaugucacuugaucauggugaa

SEQ ID NO: 397849 - RNA, 111 nt, Homo sapiens
ggaugggacgagcuugacucaugaacuuaacaccuuugauagcacuuuuuaucuacagauaaugagugaaaaguuuaaaguauugguaggucuuggucauuguacauaucc

SEQ ID NO: 397850 - RNA, 94 nt, Homo sapiens
ucuauccuauuaguucugucacucuagagaaccaugacuaauacagauuuuuguaccaggagugguucuagagggacagaauguuaaggaugga

SEQ ID NO: 397851 - RNA, 61 nt, Homo sapiens
ugggauucaguuaagggucuugagaugggaagaucaucuuggauuaccugggugggucuua

SEQ ID NO: 397852 - RNA, 70 nt, Homo sapiens
gagucuuugcuauugugaauagugccgcaauaaacauacuugugcauaugucuuuauaguagcaugauuu

SEQ ID NO: 397853 - RNA, 99 nt, Homo sapiens
uucaggcuuuuuuugguuccauauggacuuuaggauagcuuuuucuaauucugugaagagcaucacugguaguuugauaggaauagcauugagucugaa

SEQ ID NO: 397854 - RNA, 71 nt, Homo sapiens
uugccuuuguuggaaacaagugcucggcaccacaaagaagaaccagcacucagaguuucucagcaaggcaa

SEQ ID NO: 397855 - RNA, 78 nt, Homo sapiens
aucacuugaacccagaaggcggaggcugcagugagcugagaucauaccauugcacuccagccugggugacagagugau

SEQ ID NO: 397856 - RNA, 65 nt, Homo sapiens
guucauccaugcaguaucaguacuucauuccauuuuaugacggaauaauauugcauuggauggau

SEQ ID NO: 397857 - RNA, 64 nt, Homo sapiens
ucauugguucuggguguuguuggaggucaaaguuuuuucuacggcacaugcccaggcuacauga

SEQ ID NO: 397858 - RNA, 56 nt, Homo sapiens
uuuuggcucuugguaggucagaguggccuuuccuucaugccugccaaagcacaaag

SEQ ID NO: 397859 - RNA, 74 nt, Homo sapiens
uaaacgugcagagaucaauagcauuuugucuguuaaggaucagaauuugcuucuguuuguuucugucauguuua

SEQ ID NO: 397860 - RNA, 59 nt, Homo sapiens
uuucuaaguaguagcuggucagaaauuuaugcaucuguuucuuagcuauuacuggggaa

SEQ ID NO: 397861 - RNA, 60 nt, Homo sapiens
aucuuuggucaucacagcuagaggaaggcuacugguaucuaguggguagagaccagggau

SEQ ID NO: 397862 - RNA, 58 nt, Homo sapiens
acccaggaggcgaaaguugcagugagccgagauugcgucauugcacuccugccugggu

SEQ ID NO: 397863 - RNA, 67 nt, Homo sapiens
ucccugucuccggcuguccuuugagguuuugguucaggagacccagaguggagccuggggauagggg

SEQ ID NO: 397864 - RNA, 59 nt, Homo sapiens
gcccccaucuggcaguaacaagguagugcuccucuuuccuugcugguguuagaggaggc

SEQ ID NO: 397865 - RNA, 58 nt, Homo sapiens
ugagaucgagucucgcucugucgcccaggcuggagugcaguggcgugaucucgacuca

SEQ ID NO: 397866 - RNA, 92 nt, Homo sapiens
ggggccuggggagcgugguggcacugagcaagcucacaaaggccucugugucgccuggcagcucaggccccgcgcugagggcccugggcuuu

SEQ ID NO: 397867 - RNA, 82 nt, Homo sapiens
uaaagauuagagaugaguuagguaauaauaaauaugguauuuuuucuagauuugguagcauuuaacagguuucucagcuuua

SEQ ID NO: 397868 - RNA, 70 nt, Homo sapiens
ucauaaaagauaaugagauccagucauuuguaacaacacagauggaacuggagaucauuauguuaaguga

SEQ ID NO: 397869 - RNA, 58 nt, Homo sapiens
uggaaguaagcuaccuccaggacagaaguacaaucuugugagagguaguuuacuuuca

SEQ ID NO: 397870 - RNA, 71 nt, Homo sapiens
augcuugugaaguuuucagaaauugcaucaaaauuaagcaauuaacuguggaaaugacuuuaaacaagcau

SEQ ID NO: 397871 - RNA, 130 nt, Homo sapiens
ggauuauuaaguauguuguuuuauuuugaaguguuugcagauuguuuuguuaaugauuucuaguuuaauaccauugugauuggagaacaaacugcauaugauuucauuucuuuuaaauuuguuaagauuu

SEQ ID NO: 397872 - RNA, 64 nt, Homo sapiens
ucucuugugggcauuuagugcuguaaauuucccucuacacacggcuuugaaugcgucccagaga

SEQ ID NO: 397873 - RNA, 70 nt, Homo sapiens
gugauuaucccaaauagcugagacuacaggugugcaccgccaccugugguuacagucugucucuguucau

SEQ ID NO: 397874 - RNA, 66 nt, Homo sapiens
gccccuccuucuagagaggugagcuggagaaggucauuuucucaguuccuacuuuggugaaggggu

SEQ ID NO: 397875 - RNA, 86 nt, Homo sapiens
gguauuuuuuguugacuuagacauucaguuggaaggcuugaauuucugaguuccaacuucccugucuagguuuucuacauuauacc

SEQ ID NO: 397876 - RNA, 89 nt, Homo sapiens
gaacacaacuuauuugacuuucugugguccucuugaaggugauuaaucaccaauuuuagagcaccaagaauugcacaauauuaauguuu

SEQ ID NO: 397877 - RNA, 88 nt, Homo sapiens
ggagaaucgcuugaaccugggaggcugaguuugcagugagcggagaucgugccguugcacuccagccugggcaacagagugagacuuc

SEQ ID NO: 397878 - RNA, 72 nt, Homo sapiens
cuucauucacacugagacauguuugcuuaucugagacaagaguccacaugaggaaaugucuguuuucugagg

SEQ ID NO: 397879 - RNA, 59 nt, Homo sapiens
gagucacaaaaguuaauucugaugaagucuguuucauccaguguuuucuuuugucacuu

SEQ ID NO: 397880 - RNA, 66 nt, Homo sapiens
guuggugcugccagagauucagaggugccauacacuugucaaaucuggaucauucguagugccagc

SEQ ID NO: 397881 - RNA, 68 nt, Homo sapiens
gcaucuguuagagugugcaugcgggccguggggccucacagcaugugugugcacaaucuggcaugugc

SEQ ID NO: 397882 - RNA, 59 nt, Homo sapiens
uccucugaaaucuagauugugaugcaauguauacguucucuaaaucagauuucugagga

SEQ ID NO: 397883 - RNA, 56 nt, Homo sapiens
aucuccaaauacagucauauuagggguuagggcuucaacauaugaauuuuggagau

SEQ ID NO: 397884 - RNA, 117 nt, Homo sapiens
uuauaguuuuuagaaguuaugcuuauuucauuaaggaguggguucauggugcuaucccagaaguagcaccugauagcugccuccuuaucuuaaaaagcaaacuuacauuugcuguag

SEQ ID NO: 397885 - RNA, 86 nt, Homo sapiens
uaaguuuuaggguacauguguacaacgugcaguuuuguuacauauguauacaagugccauguuggugugcugcacccauuaacuug

SEQ ID NO: 397886 - RNA, 57 nt, Homo sapiens
ucuagcacuuacuggcugugugacuagaacuguaacacacaguagcuugugcauaga

SEQ ID NO: 397887 - RNA, 81 nt, Homo sapiens
ucuugaucucccuuuccuauaugaugauuugcuuaaauauccauauuaaguaagucucaagguaggguaggcagccugaga

SEQ ID NO: 397888 - RNA, 122 nt, Homo sapiens
auugcuuuggauauuuugggcauuuggagaagaggguaauucaaaggccagagaaauuaaacuuucagaauguucuuuaugcgucuguaauuucuuuuuaaaaaaugcccucuaaagacagu

SEQ ID NO: 397889 - RNA, 55 nt, Homo sapiens
uugagauggagucucacucuguggcccaggcuggagugcaguugcuucaucucag

SEQ ID NO: 397890 - RNA, 68 nt, Homo sapiens
ccccauguagagcuaguugcucacugcuuuuggcugcucucugggcagcgggaugacuaguugugggg

SEQ ID NO: 397891 - RNA, 84 nt, Homo sapiens
uauugguucuguuuuccuggagaaucuuaacaaaaacagccacuuuggguuuaguuagcaucuccagggcagcagcacacaaug

SEQ ID NO: 397892 - RNA, 57 nt, Homo sapiens
auguauggaguuuaggggaugggcacacucagagcccauacccccuuccccaaacau

SEQ ID NO: 397893 - RNA, 88 nt, Homo sapiens
ggcucaccccacucguuuagguagcuuuggcguuucuuggcuguuggacccaaguagaacagagcuaccuugcccaugggauggagcc

SEQ ID NO: 397894 - RNA, 77 nt, Homo sapiens
aacacauaacuuguuuuggccaaugaaacguaugcagaagugccaugugucaaaucuaggccaaagcuuuaaguguu

SEQ ID NO: 397895 - RNA, 76 nt, Homo sapiens
ucuggagcaugcuuccauaguauuuuuacaaaauccaaaagacuuuuguccaauagaauuauggacauguaccagg

SEQ ID NO: 397896 - RNA, 67 nt, Homo sapiens
cuucugccugagacucagaaugagacuguggaucaugacagaaucaaauuccaagucuagguaggag

SEQ ID NO: 397897 - RNA, 57 nt, Homo sapiens
gccaugaggggcugugaacaguggacuccggcccagauacugcacuuuccucauggu

SEQ ID NO: 397898 - RNA, 82 nt, Homo sapiens
cucugguucauaugccucugacaauuggauucuguauuuagauauaaaacccaaagacagaggucuaaauguguuucuugag

SEQ ID NO: 397899 - RNA, 64 nt, Homo sapiens
cuuuuugcaaauacaacucugaggcugauuuguaagccuguuaacagauuguacuuauaaaaag

SEQ ID NO: 397900 - RNA, 60 nt, Homo sapiens
auuaagagaagugugaaaaacaggauuuucaaagaaucuuggguuuguccuucuccuagu

SEQ ID NO: 397901 - RNA, 55 nt, Homo sapiens
uuggcuuggagaguugaaauguuaauuugaugugcacaucuauucuuaaagccaa

SEQ ID NO: 397902 - RNA, 67 nt, Homo sapiens
ggaauaacgcuuugaacuugguaggugcacaauaaauauuuuucuauuaagugaaugaaguuguucc

SEQ ID NO: 397903 - RNA, 67 nt, Homo sapiens
augagauuugggaggggccaagaaugaaaugauaugguuaggcuuugugucccuacccaaaucucau

SEQ ID NO: 397904 - RNA, 105 nt, Homo sapiens
cuuguagcuaaaaagagaaacuuaagugaugaaacuauaaaggaaugcuggaaaguuacuaucauagcagucaagauagucauuaucguuuuagggcaguacaag

SEQ ID NO: 397905 - RNA, 78 nt, Homo sapiens
auaagugcucaugaggcuuaauuaucagugaaaugucuugcuuuagauuucacagcuuaauaaggcucagaggcuuau

SEQ ID NO: 397906 - RNA, 73 nt, Homo sapiens
ggacgugguguuugguugauagagccacugaggcuggagcacaguggcuguaucucggcucacugcaacuucc

SEQ ID NO: 397907 - RNA, 59 nt, Homo sapiens
uccagacuagguaaccaccuacagauacuuucuaucccuauggauuugccuauucugga

SEQ ID NO: 397908 - RNA, 58 nt, Homo sapiens
ggggucuagaaacgggaccguucuuaacugacagcuugguacuguccuucuagauucc

SEQ ID NO: 397909 - RNA, 97 nt, Homo sapiens
ggaaaauuuaaaucuuguugugagaauauuuuaaauacuaauguucccccugcuauguugguguuacaauucucaauaggaaaugauucagaauucc

SEQ ID NO: 397910 - RNA, 127 nt, Homo sapiens
uugauuaauuuguuuuucuuucucaugguucugacacuuaggagauauuuaaauugcauuuuacaacuuugugcaaaaccaguccgaguguuagagagcugugugggcagaauuuagauguuuuuaa

SEQ ID NO: 397911 - RNA, 60 nt, Homo sapiens
guggguaaaucucuguuugaggcucucagcucugaaggcuugagaccccugauuucccac

SEQ ID NO: 397912 - RNA, 57 nt, Homo sapiens
ggcaugaucuuggcucacugcaaccuccgcuucccagguucaagcaauugucaugcc

SEQ ID NO: 397913 - RNA, 76 nt, Homo sapiens
caggucaggauuuguuggcauuagugaugccaucagaagaaagaagguguucaucacuaauaaauagauccacuug

SEQ ID NO: 397914 - RNA, 57 nt, Homo sapiens
ggcucagagucagggguacauggguuacacaccagcucuacccuucagcacugggcc

SEQ ID NO: 397915 - RNA, 94 nt, Homo sapiens
cgaaauauuaagauuggugugaaaguaauugcaguuuuuacgauugaaaguaacgcaaaaacugcaauuacuuuugcacuaaccuaauauauug

SEQ ID NO: 397916 - RNA, 56 nt, Homo sapiens
ugaaugcuucaugucugggcuguaagaucuacugugagcccuacaugaugcauuca

SEQ ID NO: 397917 - RNA, 82 nt, Homo sapiens
aguucuaggguacaugugcacaacaugcagguuuguuacauauguauacacgugccauguugguaugcugcacccauuaacu

SEQ ID NO: 397918 - RNA, 84 nt, Homo sapiens
cuauuagguugugaaaagcaauugcaguucuugccaucacuuucaauggcaagaaccacaauuacuuuugcaccagccuaauag

SEQ ID NO: 397919 - RNA, 90 nt, Homo sapiens
gaccggucauuuuuuaagcugguaguguuuauaaggguauuauucauauaauaauuuacuaagcucuaccuuuuuuuguguggccguguc

SEQ ID NO: 397920 - RNA, 88 nt, Homo sapiens
cagugcuguucucuggggacaucauuaccauggacccagccauuuguugguuucagugcggugguguuuacacagaacgacuuuacug

SEQ ID NO: 397921 - RNA, 97 nt, Homo sapiens
gggaggagaaucacuugaaccugggaggcggagguugcagugagccaagacuaggucacugcacuccagccuuuaugacagggcgagacuccaucuc

SEQ ID NO: 397922 - RNA, 75 nt, Homo sapiens
accuaauguacauggaaugaaauucaaaaggaauaauuuaaaugauuaggaaugguauuccauguguuuugaggu

SEQ ID NO: 397923 - RNA, 60 nt, Homo sapiens
uugguccucccaugcucaagagacucucuuugccucagccuccugaguaacugggaccaa

SEQ ID NO: 397924 - RNA, 130 nt, Homo sapiens
cuuuauaaauuacccagucucagguaugucuuuauuagcagugugaaaaaagacuaauacacccauuuacuauauuagucuguucucaugcugcuaugaagaaauaccugagacuggguaauguauaaag

SEQ ID NO: 397925 - RNA, 127 nt, Homo sapiens
caggaggaggagggaaugggagaaaugaaaggagugagaauauguguccugguguccaacuugauucccuaggucuggucccugcacauauuuucccaauauaucacccagcuuucacuucuacuug

SEQ ID NO: 397926 - RNA, 85 nt, Homo sapiens
uguacagugaaacuuugguuaucauacuuucagggaccaaauuaucagaguuuugaaguuaaaauaacuaauguuuuaaagugca

SEQ ID NO: 397927 - RNA, 85 nt, Homo sapiens
cagacuacugauuugggcuacaaauaacacugccugguuuuuuguagccagguaguguuauuugcagcugaaaucaguaaguuug

SEQ ID NO: 397928 - RNA, 64 nt, Homo sapiens
auccuagauuuuuucagaagugguaaaaguacuaaauuauaucacacuggaagaaguuaaggau

SEQ ID NO: 397929 - RNA, 69 nt, Homo sapiens
cuggggauggggaagcuguuucuucugguaagaaaguuucaucagaguuuacaagcucaguguccccag

SEQ ID NO: 397930 - RNA, 81 nt, Homo sapiens
cuggaucugugucuugccuacagaaggggcucagcaaggugaaccugcuuccuugucccucugagguuuuuccauguuuag

SEQ ID NO: 397931 - RNA, 82 nt, Homo sapiens
gguaaauaccacauauucucacucauaugugggaguuaagaaaaauugaucucauagaggcagagaguaaaugguaguuacc

SEQ ID NO: 397932 - RNA, 99 nt, Homo sapiens
acaaagaaguuuugacauuuaggaaucauacacacagcuuaaaagacccaguugcuuuuaccacaggcauguguggguuauuaaagaauccuucucugu

SEQ ID NO: 397933 - RNA, 59 nt, Homo sapiens
ggcagagagcaucuuguugggaagagcccugccugccuucccguugcugugcuccugcc

SEQ ID NO: 397934 - RNA, 71 nt, Homo sapiens
uuugaacccaggaggcugagguugcagugagcugagaucgcaccauugcacucuccagccucggcaacaga

SEQ ID NO: 397935 - RNA, 55 nt, Homo sapiens
augagaugaggaauggcccuccaggagagccagaggcuauuuccacucuucucau

SEQ ID NO: 397936 - RNA, 60 nt, Homo sapiens
ggacuagaucucccggcuucuaguucuaaacucuuuuuacugcaccaggucaucuggucc

SEQ ID NO: 397937 - RNA, 68 nt, Homo sapiens
aggccagcuauaugccaguuguugaaguaugaccuuguaaacaaacuucacaucguuuagcugugccu

SEQ ID NO: 397938 - RNA, 69 nt, Homo sapiens
ggaaauuguguucuggagauaaagccaagguuguagcuggacaacuuuugcuagugcuuuagaacuucc

SEQ ID NO: 397939 - RNA, 58 nt, Homo sapiens
ugagacagggucuugcucuuucacccaggcuggagugcaauggcaagaucuuggcuca

SEQ ID NO: 397940 - RNA, 66 nt, Homo sapiens
ucgagaugaucaugugguuuuguccuuuauucuauuacuagggcaaauuauacugauugauuuuga

SEQ ID NO: 397941 - RNA, 59 nt, Homo sapiens
ugagagaugauaaaauguuuguugucugaaucaacuacauuucgaaaugucauuucaca

SEQ ID NO: 397942 - RNA, 74 nt, Homo sapiens
ggucacuggucagugaaacaguauuuccuaaguaugucugacuuccacaauacuugaauuucaugucaggggcc

SEQ ID NO: 397943 - RNA, 65 nt, Homo sapiens
ggauguuuuaagcugcuaaauuugugcugauuuguuaugcagcuuagaaaaugaauacaucaucc

SEQ ID NO: 397944 - RNA, 61 nt, Homo sapiens
agaaauuaaacggcucugcugugcucuuccaaucuauugagaacagcugguuuugguuucu

SEQ ID NO: 397945 - RNA, 58 nt, Homo sapiens
ccuuugugcuccucucaguaugugcauuaacugcauuugacagugagucacagcaagg

SEQ ID NO: 397946 - RNA, 87 nt, Homo sapiens
ugguuacuguagcccuauaguauaguuugaagucagguggcgugaugccuccagcuuuguucuuuaugcuuaggauugccuuggcua

SEQ ID NO: 397947 - RNA, 67 nt, Homo sapiens
ccagcagcagugcccuggauggaaagccacgucccugucacccucucacauccagggcagugccugg

SEQ ID NO: 397948 - RNA, 73 nt, Homo sapiens
guuuaagccucuaagagucagguacugucugucagggaagcuuuggcaugauccuagauucaacaggagaagc

SEQ ID NO: 397949 - RNA, 79 nt, Homo sapiens
ugugaucugugacaagacuacauaucccauugguauccacaggccauguggugauuugugguauuuguccucagugaca

SEQ ID NO: 397950 - RNA, 72 nt, Homo sapiens
ccauuugcaaucuguuagcaguauuuuaguguuucuacuauuuagucaucuguggauaugaguuguaaaugg

SEQ ID NO: 397951 - RNA, 84 nt, Homo sapiens
ggcccacccuguugagcaacuggccaucccaguggcacauauugagccuggugggggguggugcaguuucaaugggguuggguc

SEQ ID NO: 397952 - RNA, 57 nt, Homo sapiens
uguuuguggguuguggcaaaucacugugacuggugauauguaugugaccuagaaaca

SEQ ID NO: 397953 - RNA, 65 nt, Homo sapiens
uagccagggccaccacauacagccaauauucuagucugguuuucugcagugugguugcccugcug

SEQ ID NO: 397954 - RNA, 66 nt, Homo sapiens
cacuagaaugucagcuucuugagggcagagauuuuuaucuguuuuccagcuguugcauucccagug

SEQ ID NO: 397955 - RNA, 59 nt, Homo sapiens
ugagauggaguuucacuuuuguuguccaggcuggagugcaauggugugaucuccgcuca

SEQ ID NO: 397956 - RNA, 60 nt, Homo sapiens
aguguggccuuacuuggacacagagggucuuugcaaaugucaucaagaugaggucacacu

SEQ ID NO: 397957 - RNA, 64 nt, Homo sapiens
ucuauguggaaguggagguggcucuugcuuugcuucagaaaaccaaauccauccaaaucauaga

SEQ ID NO: 397958 - RNA, 72 nt, Homo sapiens
caguauugacuccuuuaaccucauguagcuuucgugacuuugaaacaccauguaguagaaggagccagacug

SEQ ID NO: 397959 - RNA, 130 nt, Homo sapiens
acagaauuggcagcugggcacagagaaacaaguaagggcuuuggaguguucugguccgggcucugucauuuacuaauguagcccuugagcaaauacuuuaaaccccuugagcacugguuuccuuuucugu

SEQ ID NO: 397960 - RNA, 82 nt, Homo sapiens
gccauuuucacuucuuuugugauucuucaguugcuucaggccaucuggauguauacgugcuggucacaggggauaugauggc

SEQ ID NO: 397961 - RNA, 68 nt, Homo sapiens
gaggcggguggaucacuugaggucaagaguucgagaccagccuggccaacauggugaauccccgucuc

SEQ ID NO: 397962 - RNA, 87 nt, Homo sapiens
uggcaauuaaauauaacacuuuaauccaccuuaagaaucugaaagagauucucuguggaauggaaugauuguguaugaaucaugcca

SEQ ID NO: 397963 - RNA, 96 nt, Homo sapiens
gccaaaaagcugaguuuuggcucagugaucuguuucuguaaaaggaauagccauugucugcagauacaaucaaaaugagccagaaccacaagaggc

SEQ ID NO: 397964 - RNA, 58 nt, Homo sapiens
gcuugcuagagaugagggaugugugucuucccaccauuuggaccucauucuaguaggu

SEQ ID NO: 397965 - RNA, 55 nt, Homo sapiens
uugagauggaaucucgcuuugucacccaggcuggaguacaguggcgccaucucaa

SEQ ID NO: 397966 - RNA, 100 nt, Homo sapiens
gaggcaggagaaucgcuugaacccgggagguggagauugcagugagccaagaucaugccauugcacuccagccuuggggagaagagugagacuucgccuc

SEQ ID NO: 397967 - RNA, 56 nt, Homo sapiens
uaaaucgaaacugcuccuggauauuacaaaagugugcagguaggcaguaucauuua

SEQ ID NO: 397968 - RNA, 67 nt, Homo sapiens
auagauucauuugaggagauuugagaacaugagccaauuccugcaacaaaucucuuuauauaucugu

SEQ ID NO: 397969 - RNA, 98 nt, Homo sapiens
cuucucaguacucaaacagaugccccauguaucaugaaguuucuucauuuugcuauuaaaauggaagcuauuuaugauucugaaggagcucugagaag

SEQ ID NO: 397970 - RNA, 92 nt, Homo sapiens
ggcaaccagaagugggagugugcacaauuucagccuuguccaagaacucagcucuacuugguauacucccacuguguucuugguuuccugcc

SEQ ID NO: 397971 - RNA, 82 nt, Homo sapiens
aguucuaggguacaugugcacaacgugcagguuuguuacauauguauacacgugccauguugguaugcugcacccauuaacu

SEQ ID NO: 397972 - RNA, 82 nt, Homo sapiens
aguucuaggguacaugugcacaacaugcagguuuguuacauauguauacacgugccauguuggugugcugcacccauuaacu

SEQ ID NO: 397973 - RNA, 63 nt, Homo sapiens
ugucucugguuaugucauuaagcaguuuggugaacguuuuguaugaggcauacaucaggcaca

SEQ ID NO: 397974 - RNA, 56 nt, Homo sapiens
uugaaguaguacuuuauuauaguaguuuugaaguugcuuuugaaguacuacuuuaa

SEQ ID NO: 397975 - RNA, 69 nt, Homo sapiens
gcuaagauuucagcuugauguuauuaguuaucauguuaaugauaacagauaaugucaguuaucaugggc

SEQ ID NO: 397976 - RNA, 59 nt, Homo sapiens
cugcugccuuuuguucuacuaugcccugccugcagagguggaaucuauagaggcaguag

SEQ ID NO: 397977 - RNA, 60 nt, Homo sapiens
caggccuggccucuguaacuaaugcaauggcauauugcagaaaugacagagcgccgucug

SEQ ID NO: 397978 - RNA, 69 nt, Homo sapiens
gcgauucuaaagccuguuguucaggaaucaaucuuuaacaaugauuauagaaguaauggguuuaauugc

SEQ ID NO: 397979 - RNA, 62 nt, Homo sapiens
uacuuuaauuuuuuaaggcuuugauuauauuuaaucuccuggccugaugaaauguuagagua

SEQ ID NO: 397980 - RNA, 70 nt, Homo sapiens
gagccuguaggaggagagguggccgcagucuccacaaaccagcagacuuagccuuuccuccugcuaguuc

SEQ ID NO: 397981 - RNA, 62 nt, Homo sapiens
uagagugcugucaaagacuuguguuacucauuccuaagcauaugucaugcaccagcacuuua

SEQ ID NO: 397982 - RNA, 66 nt, Homo sapiens
cuagugguaauucugugagauggugcagauguaggauauuuccaccggcucaggaaguucuauugg

SEQ ID NO: 397983 - RNA, 81 nt, Homo sapiens
cugcaccaccucuccuccagcuaguauaagcauggagugagaagcugugugccuaguggaaggagagcaaagugagugugg

SEQ ID NO: 397984 - RNA, 72 nt, Homo sapiens
gcuucccaagaauugaaugauugucuuaugagagagugaaauuuccaucaucaggcucauucaagcugaagu

SEQ ID NO: 397985 - RNA, 79 nt, Homo sapiens
uacucuuuggaaguuaauacagauagaguagaaacaaggcaaccuagcccccuccuuuuucuguuuuagcuucugggua

SEQ ID NO: 397986 - RNA, 67 nt, Homo sapiens
gcuagggagugucuucauuuuguagaaauaucuuucugauuucuggcggauaaacaucucccuuggc

SEQ ID NO: 397987 - RNA, 92 nt, Homo sapiens
ugggccugagcuaaagcuuuuuugauuaauggguagaccacaauaacauuuuggaucuccugggauuaaugucagcucagagccagugccca

SEQ ID NO: 397988 - RNA, 77 nt, Homo sapiens
gcagcuuguuuuuauagaugcauuuuuauuggaauacagucucaugcauuucaaaaaaauguauugucuguggcugc

SEQ ID NO: 397989 - RNA, 60 nt, Homo sapiens
gaccagugaauuuaaugagcaugagcccacugccacacaucuuuggugaguucuuugguc

SEQ ID NO: 397990 - RNA, 69 nt, Homo sapiens
cuugaggacgugaggaguauuuuuaggugcugaaugcagcccugaaauauuuccacggccacucccgag

SEQ ID NO: 397991 - RNA, 86 nt, Homo sapiens
uagugguaacaguggaugggcugcucucaggcuggggagcacacacuuuguucccuguguccugggggcaccucccugauaugcua

SEQ ID NO: 397992 - RNA, 71 nt, Homo sapiens
cuucucuauuaugcaugucaaauuuguagguucuucucaagaacucaaugaagauauaguguauagggagg

SEQ ID NO: 397993 - RNA, 63 nt, Homo sapiens
uuaugguuuucucucacgcaggaguagaaaggcaggguaccuggagugaggaggagcacauag

SEQ ID NO: 397994 - RNA, 69 nt, Homo sapiens
aucacagugagcauaugucuauaaaaguaaccaaccacaccugcugcuagaaauaacugccacuguggu

SEQ ID NO: 397995 - RNA, 58 nt, Homo sapiens
guaaacugaucugaaggccaggcucuccugggaugcuugcaaaucagaucaaguuuac

SEQ ID NO: 397996 - RNA, 68 nt, Homo sapiens
gaaugacccagaaagcucugucuggccuuuggccaaaauuggcauggcagguuggucuaggucuauuc

SEQ ID NO: 397997 - RNA, 60 nt, Homo sapiens
ugacucuggcaggcucggggaccaguucuacaaggaagccauugagcacugccggaguua

SEQ ID NO: 397998 - RNA, 88 nt, Homo sapiens
ggaggggacauaagcucaauuuccuggaggggaaguguccaaauacacuauuuggaguucuucuaucaggacauuuugucccaucucc

SEQ ID NO: 397999 - RNA, 84 nt, Homo sapiens
aacauguuuugaaguguguauacauuguggaguggcugcaucaagcuaaugaucacauguaucaucucacuuucugaucauguu

SEQ ID NO: 398000 - RNA, 58 nt, Homo sapiens
gcauguguguacuuaugacugagaauuaaacuaguacagucauaggaguacauaaugc

SEQ ID NO: 398001 - RNA, 60 nt, Homo sapiens
aaguucuauuuugaucuccaauugagaagaaacugaggcuuguggagauaagaagaacuu

SEQ ID NO: 398002 - RNA, 55 nt, Homo sapiens
ucugacccucugucauguauguaacaucuuuugcugaugccacagugaggucaga

SEQ ID NO: 398003 - RNA, 60 nt, Homo sapiens
acugugugucacugaggguuaguguaugaaugaucccgucacccaguuagugagcauagu

SEQ ID NO: 398004 - RNA, 128 nt, Homo sapiens
agagcuuuuuggacaaguauuuuaagguuuucuagguauauaaucauaucauuggugaacagugauaauuugacuuacucuuuacugauguggaugccuuuuauuucuuucucuugucugauugcucu

SEQ ID NO: 398005 - RNA, 87 nt, Homo sapiens
caguugaguagugguauguaggucuacgguacaaauacaaaaauaaguguuugagcaggucacaacaugcccacacaccgucaacug

SEQ ID NO: 398006 - RNA, 78 nt, Homo sapiens
cggacaagucaguagucaguucaggucaaagaaaaggugccacuauucuugcacuuaacugacauucugaaauuucug

SEQ ID NO: 398007 - RNA, 88 nt, Homo sapiens
gguuuuccucauguuucuugucauugcaguaagagugggcucuugaaguuucccaagggucuuacuuuccuguagucaugggaaggcu

SEQ ID NO: 398008 - RNA, 67 nt, Homo sapiens
uugaggaggcagucuucccauucucagaucuccagcugcguacugggagaaccacugcucucuucaa

SEQ ID NO: 398009 - RNA, 65 nt, Homo sapiens
ggaagcauugaggggcaugcauugaggaucucccccacucacccuauggcuuagucaguguuucc

SEQ ID NO: 398010 - RNA, 82 nt, Homo sapiens
guuaguuaaggguuacacagcuaguuagugguagacacaguuaagggucacacagcuagucaaugguagacaguuaaaagac

SEQ ID NO: 398011 - RNA, 60 nt, Homo sapiens
augcaaacagcuaucuggcuggccuaaggcauucuucuccccuaguauagcugcuugcau

SEQ ID NO: 398012 - RNA, 84 nt, Homo sapiens
gggaugaaauguuaugcuaucauucaggauuuguuuuaaaaauacugaggcaggccagguaugguagcucaugccuguaauucc

SEQ ID NO: 398013 - RNA, 59 nt, Homo sapiens
aaccgacuuuuucaaauuguuuuaugcuauguuuuagccuuggaacauaaaaguugguu

SEQ ID NO: 398014 - RNA, 55 nt, Homo sapiens
auggaguguggaacugggaaucugacaaguauggauuccaauuuuggcacaccau

SEQ ID NO: 398015 - RNA, 90 nt, Homo sapiens
gugcggguccugaugagucuuugucuuaaacuuuacagcuuuuucauacagucuguguaguacuagauugagcaaucuuuaaaucugcac

SEQ ID NO: 398016 - RNA, 78 nt, Homo sapiens
cagguccuugccaucaucucuuacucagucuauuucauagagcccccugacucagccaggcgugguggcucaugccug

SEQ ID NO: 398017 - RNA, 69 nt, Homo sapiens
ggaagugaauaguaauguguuuggucuccaaggugaaaagucaacagacuccacauuacuguaauuuuc

SEQ ID NO: 398018 - RNA, 127 nt, Homo sapiens
gaguugauuuuuguauaugaugagagagauaagucuauuuucacguaucugcauaugaauauucaauuuuccuagcacuauuuauugaaaaggauguccuuucuccaauguauguucuuaucagcuu

SEQ ID NO: 398019 - RNA, 86 nt, Homo sapiens
aguggacauccuugccuugugccugaucuuagggggcauguccuuuaaugagccacccugggaagucacauaguaucauuucuauu

SEQ ID NO: 398020 - RNA, 87 nt, Homo sapiens
uaauuguugagcuaguagauuuuaaauauuuccacuacaaaauaaguauguaagguaauguguagguuaauuagcuugauuuaauua

SEQ ID NO: 398021 - RNA, 77 nt, Homo sapiens
auauuuucagguaaaaaguagaaugaagcauucucagaaacuucuuugagaugugugcauucaacucacagagaugu

SEQ ID NO: 398022 - RNA, 73 nt, Homo sapiens
ucauuggguuauuagcgugagguagaaucuaggucuauuuaguucucacuggugcugguaaguuuuacaauga

SEQ ID NO: 398023 - RNA, 71 nt, Homo sapiens
uucuacaacauacauauuucaguguccauaaacuccagccauguggauauguuuauauguugucuauggga

SEQ ID NO: 398024 - RNA, 91 nt, Homo sapiens
uguuacccauaauuuggaauucucacucagauuugaucaagucagguagaguuggucaaaucugaugugagaaagaccggaauaaauaaca

SEQ ID NO: 398025 - RNA, 59 nt, Homo sapiens
gauuccacuuucugucucuaugaaauaaaauacucuagggaccucagauaaguggaauc

SEQ ID NO: 398026 - RNA, 83 nt, Homo sapiens
ccuauuacuaaacuugacaucugucaguuccucaaucaaaaagauacuauugagagcucaucacuguuaagugauauaauggg

SEQ ID NO: 398027 - RNA, 76 nt, Homo sapiens
ccucaucccauucgaggggcacagcuggaggagggccagagcgggcucucugcuguccucuugggugggaucaagg

SEQ ID NO: 398028 - RNA, 61 nt, Homo sapiens
agacacacaccccuaaucucaaugcugaggucacugcuaugaguuaggagaguguggcucu

SEQ ID NO: 398029 - RNA, 74 nt, Homo sapiens
gaaaaugccuuucuuacuaugggucaagaucaaaaaaguuuggaacucacuggucuaaguggagggggauuuuc

SEQ ID NO: 398030 - RNA, 55 nt, Homo sapiens
ggcuaucuuagucuguuuugugcugcuaaaacagaauaccacagacuggguaguu

SEQ ID NO: 398031 - RNA, 72 nt, Homo sapiens
agggugcugguguagagugcagaaagguaggccuuaucaccuuuucuuaucuucucucucaucagucauccu

SEQ ID NO: 398032 - RNA, 57 nt, Homo sapiens
gagaucaugcugguucucucaucuuucaauaguugcuuagauccagucauguauuuc

SEQ ID NO: 398033 - RNA, 74 nt, Homo sapiens
uguauaaucuuaguuuagauuagcaauucgggaucucuuuuucccugaauucuaaccauuaagccaagcaagca

SEQ ID NO: 398034 - RNA, 58 nt, Homo sapiens
gaaaugaauauuuauguaaagcaucuggcacagugggugcuuacugaauguuaauuuc

SEQ ID NO: 398035 - RNA, 73 nt, Homo sapiens
uugauuucuuucuguuacuuuaaaaacuauuguauuucacucaaaauaugcaugaaguagcauaggaugucaa

SEQ ID NO: 398036 - RNA, 58 nt, Homo sapiens
uuuaacauuggaugagaucgucuaagugaacuaguccagugucccauccgauguugaa

SEQ ID NO: 398037 - RNA, 69 nt, Homo sapiens
gugacauuuaaagcuggcguuacaguuuguagguuuuacaaaucauggcucuagcuuacaaauguacac

SEQ ID NO: 398038 - RNA, 67 nt, Homo sapiens
uucuuuagguguuauaguucaagauauaaagagaagacuuuaggcugaacuuaaaauauguaaggag

SEQ ID NO: 398039 - RNA, 60 nt, Homo sapiens
ugaaggaguauggauaagucguauccuucucuuugcuuuugacuaugcuuugcucuuuca

SEQ ID NO: 398040 - RNA, 127 nt, Homo sapiens
gcacccccauagaguugugagcccuuaaaaaggacaggaauugcucagucagggagcucggcucuugagacaggagucuugccgaugcucccggcugaauaaaccgcuuccuucuuuaacucggugu

SEQ ID NO: 398041 - RNA, 129 nt, Homo sapiens
agaaaauaaaguaucaagguaacaauuagcaugaugacuggaacagcaauuuacauucacuguuaauauuaagauguaaagugccguuccagucaucaugcuaauuguuaccuugauacuuuauuuucu

SEQ ID NO: 398042 - RNA, 82 nt, Homo sapiens
aguuuuaggguacacgugcacaacgugcagguuuguuacauauguauacaugugccauguugguaugcuguacccauuagcu

SEQ ID NO: 398043 - RNA, 57 nt, Homo sapiens
uacuguaggacuacugugaaaucucuacuucuuggggucacugagugguccacagua

SEQ ID NO: 398044 - RNA, 99 nt, Homo sapiens
gaggcaggagaaucgcuugaaccuggaaggcggagguugcagugagccgagaucgugccacuguacuccagccugggugacagagugagacuccgucuc

SEQ ID NO: 398045 - RNA, 58 nt, Homo sapiens
cauggcaaaaccccguuucuaguaaaaauacaaaauauuagccggguguugugucaug

SEQ ID NO: 398046 - RNA, 90 nt, Homo sapiens
gagaggaucacaugagccugggagguugaggcugcaauggguugugaucgcaccauugcacuccagccuaggcaacagagugagacuguc

SEQ ID NO: 398047 - RNA, 67 nt, Homo sapiens
ucuugguuauggaaggcugugguuggccuuguaacaaccugcaauaauugcaccaucuagaucaaga

SEQ ID NO: 398048 - RNA, 60 nt, Homo sapiens
gggaagaagucagugucaugcggagucuuggcucuuuacauaugaccugucuuuucucuc

SEQ ID NO: 398049 - RNA, 55 nt, Homo sapiens
uugagauggagucuugcucuguagcccaggcuggagugcaguggcaccaucucgg

SEQ ID NO: 398050 - RNA, 69 nt, Homo sapiens
cugugaacauuuuguauauauuauucugcaauuccauuaauagguaaaaugugcaaacauguucuauag

SEQ ID NO: 398051 - RNA, 61 nt, Homo sapiens
augaauccauuccugccacagacuucgauugcgggccuacugugugcucggauggacucgu

SEQ ID NO: 398052 - RNA, 84 nt, Homo sapiens
gugccaauaauauuuuuaaaauugcuauacauguggaagaaaaauucuuucaagucaauuuuugaaugacuguuuguuagguac

SEQ ID NO: 398053 - RNA, 72 nt, Homo sapiens
cuauguaccuggaacuguauuauuugaagaaagauauaucauaagcaagccagaaauaguucuugugcauag

SEQ ID NO: 398054 - RNA, 64 nt, Homo sapiens
cuucaagaaugugcuguuggcugggcgugguggcucaugccuguaaucccagcacuuugggagg

SEQ ID NO: 398055 - RNA, 57 nt, Homo sapiens
ggauauccuuguuaauauucugacuuguugaucugucuaauauugacaguggugucu

SEQ ID NO: 398056 - RNA, 85 nt, Homo sapiens
gauuggucagagcgucagacugugcucuacaauugggugagaccacaggcucugcccuguguuuggguauggucacugacuaguu

SEQ ID NO: 398057 - RNA, 103 nt, Homo sapiens
caauguuggagguggggccugguggauggugauuggaucauggaggugaauuucucaugaauuguuuagcaccauucuccuugguacuguccucaugauagug

SEQ ID NO: 398058 - RNA, 62 nt, Homo sapiens
uagguaucuugguauaucaggaugugaguuagucacuucugaaaacuuucuaggaaagccua

SEQ ID NO: 398059 - RNA, 63 nt, Homo sapiens
aucauccugucaggagcugugaccaauucucaacccuacaaauggcacagaucucaagaugau

SEQ ID NO: 398060 - RNA, 70 nt, Homo sapiens
gauuuguagccuggggguuuucuaaaguaucuaaaaauuuuggguaguguaaagcacuccaguuagaauu

SEQ ID NO: 398061 - RNA, 60 nt, Homo sapiens
gagaaugaugauuuccaguuucauccaugucccuauaaaggacaugaacucaucauuuuu

SEQ ID NO: 398062 - RNA, 61 nt, Homo sapiens
gugaaagguaggaacagggugcaggucaccagacucugaggccaguguucuuccucuuugc

SEQ ID NO: 398063 - RNA, 60 nt, Homo sapiens
uuugagauggugaagucucacucugucgcccaggcuggagugcaaugacaugaucucgga

SEQ ID NO: 398064 - RNA, 99 nt, Homo sapiens
aguacaagaucaaggugccagcaggguugaugaccaccucuuuuuugccucuugauguugucaucaucaguccucugugcacaugugauccuggugucu

SEQ ID NO: 398065 - RNA, 63 nt, Homo sapiens
acugcauuugguaaagucaagaacaaaauaaagauggcccucuugcuguuuucccaaugcagu

SEQ ID NO: 398066 - RNA, 88 nt, Homo sapiens
uaagagaaagugacuugaggcaaggcugaaugaaggcauaaaucaagcgaugcaggccucauuggucuugcuggggauuuuugucuug

SEQ ID NO: 398067 - RNA, 89 nt, Homo sapiens
uguggggauggcaugaccuuguccucagugucauccagaaaggaugagggggacaggugucauagcaggaguauuaguucauucucaca

SEQ ID NO: 398068 - RNA, 69 nt, Homo sapiens
gcagccugggauuuggagccacuacuggucucugugucuuggugguaguggucuccugggcccagcugu

SEQ ID NO: 398069 - RNA, 89 nt, Homo sapiens
ggcauauauauuagauucaaaaucacaaagagcugccuuuaagauuuucucuuaagcauugacuuuggacagucugguggcuaugugcc

SEQ ID NO: 398070 - RNA, 59 nt, Homo sapiens
gugauugcuuuuacugggagcuuugaaaaaaaguucaaggguuccuaauggucaaucau

SEQ ID NO: 398071 - RNA, 64 nt, Homo sapiens
acugugaauagugcugcaguaaacauaugugugcaugugucuuuauagcagcaugauuuauagu

SEQ ID NO: 398072 - RNA, 76 nt, Homo sapiens
aaugagcugagguaaguaagaauggcaagcauauagacagaauuugcuauguuaaucuuauuuaccauuccucguu

SEQ ID NO: 398073 - RNA, 91 nt, Homo sapiens
uucuucccacagacauugauugaacaucuguucuuguaucccuccaugaagcuuggcacaaagcagguguccacaauguuugcugaaugaa

SEQ ID NO: 398074 - RNA, 82 nt, Homo sapiens
gguuaucaagcagugcauaggaucuaaaauuugauuuccuuaaguucaaauucuggaucuaugacuuauuagcuggguggcc

SEQ ID NO: 398075 - RNA, 71 nt, Homo sapiens
gacgugaguuuugggggggcugguaaaagaaugcuaugguuugaguauuuguccccuccaaaagucauguu

SEQ ID NO: 398076 - RNA, 65 nt, Homo sapiens
cauuuacauaguguguggguucggggggagacugguugccccacccuaaucuuauuaugcaaaug

SEQ ID NO: 398077 - RNA, 75 nt, Homo sapiens
acaugaaauuugugagauagggguggaauaauacaguuaggguguuugucaccucuaaaucucauauuaaaaugu

SEQ ID NO: 398078 - RNA, 130 nt, Homo sapiens
aaagauauuacugccaauauccuaggggcuguauaccccuccugugauauuguuucuaauauccaguggagaccaggaugauauuacuuccaauauugcaagggauguacagccucgcugugauauuuuu

SEQ ID NO: 398079 - RNA, 56 nt, Homo sapiens
ugagaacggauacuaagggcugggaagaaugcccaguucugaccuaaccuuucuca

SEQ ID NO: 398080 - RNA, 56 nt, Homo sapiens
guugguucucuuuauaugcuggauuacauuuauugauuuguguauguugaaccaac

SEQ ID NO: 398081 - RNA, 130 nt, Homo sapiens
cuuccaaaauaucuucuaaauauauguuguagauuaaguugugccugaaaacuuguaaucacaaaaaaaucacaaguaucaaauauaaacuuguauuuauucagcagcucaccugaucauuauuuggggg

SEQ ID NO: 398082 - RNA, 58 nt, Homo sapiens
auguauguuuucuacuuguacguuuaauuuuuuucuauguggaaguagaaacauaugu

SEQ ID NO: 398083 - RNA, 85 nt, Homo sapiens
gggcuuuaaauuaagguguccuggcucuagagucugugcucuuaacauauacuguacugucuggggcagucuaaguuuacagccc

SEQ ID NO: 398084 - RNA, 62 nt, Homo sapiens
guauggcucuuauuauuuugagguauguuccuucaguacccaguuuauugagaguuuuuaac

SEQ ID NO: 398085 - RNA, 67 nt, Homo sapiens
aaugccuucuuaagaguaacagaagaccuuuagcaaauuguuccuuugcuguuguacuccaggcauu

SEQ ID NO: 398086 - RNA, 76 nt, Homo sapiens
guagcuuuuaauaugucuugaaauuggguaaucuaagucuucaaagauuguuuguuuucaagauuguuuuggcuau

SEQ ID NO: 398087 - RNA, 89 nt, Homo sapiens
gggggauggggcagcaggaggggcugggagagacaggacagccuggggagguuccugugacccccaagcccacucugcccuugcccccc

SEQ ID NO: 398088 - RNA, 93 nt, Homo sapiens
cacuccucuaucaucuuggcuuuucauccugggacauuaagugugagcagaaaagugucacauaggggugaagauacaaucuggugaggggug

SEQ ID NO: 398089 - RNA, 106 nt, Homo sapiens
aggcugaggcagaagaaucgcuugaacccggugggcggagcuugcagugagcugagauagcgccacugcacuccagccuggguggagcgccacugcacucuagccu

SEQ ID NO: 398090 - RNA, 129 nt, Homo sapiens
ccauuuucccauaagcugugugauuuuuauagcaagauuuugcguugcacaguaauuuuuagaaauguauauuucauguuacagcagaauugauugcauuguaggcuuggugaguuugugggaggaugg

SEQ ID NO: 398091 - RNA, 62 nt, Homo sapiens
ugagaaugaugauuuccaguuucauccaugucccuacaaaggacaugaacucaucauuuuua

SEQ ID NO: 398092 - RNA, 78 nt, Homo sapiens
ggggcagucaguaggaacuguaacuaugucucugaugcaccacguguuuagacacagcacaguccuuuuuucuguucc

SEQ ID NO: 398093 - RNA, 60 nt, Homo sapiens
ggcuguuguuuuauacuucuaaguuugguauaguuugcuauauaguguaggaaaacagcu

SEQ ID NO: 398094 - RNA, 66 nt, Homo sapiens
guauuucuaguucuagaucccugaggaguugccacaccgacuuccacagugguugaacuaguuuac

SEQ ID NO: 398095 - RNA, 88 nt, Homo sapiens
ucaucgaggauccaugguauggcaguuucagcuauaguuuuugcucagggauuuauuguuggaauucuauccuggaucuauguuguga

SEQ ID NO: 398096 - RNA, 86 nt, Homo sapiens
auaagacugaaucaguaauaaaaagucucucagcaaggaaaaacucaggaugagauggcuuuauugcugaauucuaccaaacuuau

SEQ ID NO: 398097 - RNA, 92 nt, Homo sapiens
ggggggaaaacacguuuguguaauuuuucaggcugugagaaagcaauuauuuucuuuggucagaaagauuacacucgauaguuuuucacucc

SEQ ID NO: 398098 - RNA, 116 nt, Homo sapiens
uucauauccuauccuccgcugggcuaacauuuuacaauccuuccacaggcuguuaucagcuaacaccuugcagggauuaugacagcuggcucaggggaggaacacguggaaaugga

SEQ ID NO: 398099 - RNA, 73 nt, Homo sapiens
ccaucugcuuggcagaaaaggucggggguuugcaaagggaguagccucugguccuuuuuucccuuaggcgugg

SEQ ID NO: 398100 - RNA, 81 nt, Homo sapiens
cacagagauacaucccugaggaauuucugcacugcaucauucccugauacaggugagaugcucucugggaggccuccugug

SEQ ID NO: 398101 - RNA, 63 nt, Homo sapiens
agugcauuagaaucaccuggaaggcccuaacagccagcugggccccaguguucugauugcacu

SEQ ID NO: 398102 - RNA, 72 nt, Homo sapiens
uugguugaguaugcuuuugacauuuuacacaaaaaaguuugcccagauaaaugucauggaguguuuccccaa

SEQ ID NO: 398103 - RNA, 123 nt, Homo sapiens
gaccagcaacaucagcaucaccugggaguguguauggaaugcagauucucaggaccccagcccaggcuuccugagucagcauccguuuguaaugagcucccugggggauuugaaugcuccguc

SEQ ID NO: 398104 - RNA, 93 nt, Homo sapiens
cagcacagcugaggagcagccaacucuguaccauggggccugcaggaaagccucugagcugcuguggcagauuggauucuccuaagcuggcug

SEQ ID NO: 398105 - RNA, 61 nt, Homo sapiens
ugaagauugaauggaauaauguguaggaaaugccugcuacauuguagguauucaaacuuua

SEQ ID NO: 398106 - RNA, 127 nt, Homo sapiens
auguguugcuauaccuaagacugaauaaaugguaaauauuguuguaguuguuggaaaauucuccaggcauugugcaucgaugauuuaagaaguuagauauucaagucaggcgcuguggcucacgcgu

SEQ ID NO: 398107 - RNA, 83 nt, Homo sapiens
aaggaaaaauguuugagaccgaacuucucugucuuagaauggaaugaagucagagaucauuuuguuucaaaucguuuuuuuuu

SEQ ID NO: 398108 - RNA, 57 nt, Homo sapiens
uggaugccuaauaaaugcagacuugaauugaauuccauuguauuuauaggucauuca

SEQ ID NO: 398109 - RNA, 76 nt, Homo sapiens
gucacguuacuguaaggcaggagcauucuggagcuugcgugcaacuuucccauugucucugaccuugccaugugac

SEQ ID NO: 398110 - RNA, 84 nt, Homo sapiens
auauccuuugcccauuuuuaaugggguuguuuguuuuuguguguguauauaaauucauuuaagcuccuuauagaugauggauau

SEQ ID NO: 398111 - RNA, 61 nt, Homo sapiens
uuucuuugaguguauacuuagauuugugggaucauaagucuauguuuaacauuuugaggaa

SEQ ID NO: 398112 - RNA, 98 nt, Homo sapiens
ccccauaucagaggugguuuggcagagggguuaggagacuagacuccaccuaacucucuaaauccuggcuccacuguuuauucccucuggguuugggg

SEQ ID NO: 398113 - RNA, 109 nt, Homo sapiens
gacagguaacaggugaggaagaaauuugggcuugacugaaguaaugggggaugucugugaagccuugcggcaguacagcccagguaauuugcugagccugauggguguc

SEQ ID NO: 398114 - RNA, 108 nt, Homo sapiens
aauguuuucuuuaggcauagauuggugcauguauuuuaaacagaguuguauuuuauauacuguuuauaaccuguaaccauaugaucaguuuccaugucuuuaaauauu

SEQ ID NO: 398115 - RNA, 109 nt, Homo sapiens
ucagguccuguccccagaauaagagcuuggguuaaaguugccuuucugggcgcuguucccagaauaagagcuucuuaacaacaagcuccauuucccuuuaaugaccugg

SEQ ID NO: 398116 - RNA, 69 nt, Homo sapiens
cgguguguccaaagcauccaggauguuagauuuguuaaaccaagugaauguccauugauguuuugacug

SEQ ID NO: 398117 - RNA, 65 nt, Homo sapiens
ccucucuugcagcaaauaggaaugaggaagccaaugcuagcuuccucuugugacuguaagacagg

SEQ ID NO: 398118 - RNA, 80 nt, Homo sapiens
gcugugaaggacuagggaccaugagcaauccauuuuggugacagugcuggaagcaguagucccuaagucccauuuccagc

SEQ ID NO: 398119 - RNA, 58 nt, Homo sapiens
uuuggaagcacauuguuuaauuaaggaggauacuguuuaauuuccauguguuuucaaa

SEQ ID NO: 398120 - RNA, 56 nt, Homo sapiens
gaugaagugcccucuagugacccaacuaagugguggucacuggagcucauuugauu

SEQ ID NO: 398121 - RNA, 58 nt, Homo sapiens
agaaccagucagcaugucccagcacaugcucagagaggaacacaugagacuggauucu

SEQ ID NO: 398122 - RNA, 65 nt, Homo sapiens
ucuccaaaguuuguuuucuuggggcauucuuccacauaggugcacucagaaaacagauaaggaga

SEQ ID NO: 398123 - RNA, 70 nt, Homo sapiens
ggauuuggauugccaguauuuuguugagaauuuugcauugauguucuucaaggauauuggccucaaguuu

SEQ ID NO: 398124 - RNA, 62 nt, Homo sapiens
agcugguuaggaagcucucguguauauuuagagacaauuacaagaaagcuggacuugccgcu

SEQ ID NO: 398125 - RNA, 67 nt, Homo sapiens
uccugauggagcuugcagcuucacuccaugaucuucaaaaauggcugacugugcagcuccaucaggg

SEQ ID NO: 398126 - RNA, 60 nt, Homo sapiens
uggauuucuauguugaccagucuagaccuuuugucuauucgauguuuacauagauguuua

SEQ ID NO: 398127 - RNA, 66 nt, Homo sapiens
uaaaauaguuuauguagcaaagccucaaaaugcagucucuaagggccaugcuaugagauuauuuua

SEQ ID NO: 398128 - RNA, 63 nt, Homo sapiens
gaagaucuagacggugcacccagaacauccgcuacaguucaucccuugcaccauuugauuuuu

SEQ ID NO: 398129 - RNA, 60 nt, Homo sapiens
cccacggucacugugcaguucugugcccgcagguacacaugcuccacuguggccucuggg

SEQ ID NO: 398130 - RNA, 84 nt, Homo sapiens
uuuguuaaaaauccacauucauggaccaguccuauugaaucagcgcuuuagagguaggacugaguaauuugcauuuuuaacaaa

SEQ ID NO: 398131 - RNA, 117 nt, Homo sapiens
ucaguuuccauguaauugagcgguuuuaagugaguuucuuaauccugaguucuaguuugauugcacuguggucugagagacaguuuguuaaaauuucuguucuuuuacauuugcuga

SEQ ID NO: 398132 - RNA, 92 nt, Homo sapiens
gcauauaauagcaaaaauaguaauaauaguuguuaauauuuauuuagaacugccaauuguugacaaugcacugugcuaagugcuuuauaugc

SEQ ID NO: 398133 - RNA, 85 nt, Homo sapiens
auaaucccauagacacugcauauuuuuuuaaguccugaucuucacaguagagcuuaaagaaaguguaguauuguaauguaauuau

SEQ ID NO: 398134 - RNA, 69 nt, Homo sapiens
gugauggaauggcacuuugaagauuagauuagaugggauguaauuuucaucuuggaugccuucugucau

SEQ ID NO: 398135 - RNA, 69 nt, Homo sapiens
gcagggcugcugcacugagacaccuggcgccuaggcccuccccaggccuuuugugcaugugcagccugc

SEQ ID NO: 398136 - RNA, 129 nt, Homo sapiens
accucaaaucaucaggcauuaguuagagucucauaaggagcacacaaccuagaucccuugcaugugcaguucacaauaugguuugugcuccuauaagaaucuaaugucauuacugaucugacaggaggu

SEQ ID NO: 398137 - RNA, 59 nt, Homo sapiens
ugugacuucauuugguaauugggucuuuaaggaggaaccuaauugaaaaugaugucaua

SEQ ID NO: 398138 - RNA, 72 nt, Homo sapiens
gucagcaaagaggaauaguuugauuucuucuuucccuauuuggaugucuuuuauuuauuucucuugccugau

SEQ ID NO: 398139 - RNA, 80 nt, Homo sapiens
gcagggcuuaauaccuaggugauggguugauaggugcagcaaaccaccauagcacacguauaccuauguaccaaaccugc

SEQ ID NO: 398140 - RNA, 74 nt, Homo sapiens
agagcacaguuuagcuggagccucugcucagcaucucacaaggcugcaaguaaagcaucagcuagauguguucu

SEQ ID NO: 398141 - RNA, 66 nt, Homo sapiens
caacaaaugcugagccagaaauauuccaauauucuccuuguuggcaaguuucugucagcaaaguug

SEQ ID NO: 398142 - RNA, 75 nt, Homo sapiens
gguacauagugauucucauugugauuguaacuugcauucccuuaaugaugaacaaugagcaucuuuuuaugugcu

SEQ ID NO: 398143 - RNA, 129 nt, Homo sapiens
uagucugcaccucaaagcguugcugugaagauuaaaugagcuaauauggguaaguugcuuaguucagcaccuccucaacucucauuguuaguucuugauagaaucaucaaugcgguaagaugcauacua

SEQ ID NO: 398144 - RNA, 65 nt, Homo sapiens
auagagaguuuugagcucaggaguucaacagcaaccugagcaacauuucaaaacuccaucucuau

SEQ ID NO: 398145 - RNA, 90 nt, Homo sapiens
gauaggcuagacuaagcuguaauguuugguagguuagguggauuaaaugcauuuugaccuagaauauuuucaguuuaagguggguuuauc

SEQ ID NO: 398146 - RNA, 99 nt, Homo sapiens
gaggcaggagaauugcuugaauccaggaggcagaggcugcagugagccgagauugcgccauugaacuccuccugggcaacaagagcgaaacuccgucuc

SEQ ID NO: 398147 - RNA, 93 nt, Homo sapiens
ccagcuggagugcaguggcacaaugucagcucacugcaaccuccgccucccagguucaagcgauucuugugccucagccucccaagcagcugg

SEQ ID NO: 398148 - RNA, 68 nt, Homo sapiens
aguuaauuuuggggcugcaaaaguuugggaucuucacuuuucuuacuaugcuuuucuuagaauuaacu

SEQ ID NO: 398149 - RNA, 115 nt, Homo sapiens
acagaguucugcaucaauucuauuucuacuuuucauuuuuguagaugcaagcacagaaaagccuuguuugaagacuacugggagugaaagaaguuuaauuacggcaguuuuaugu

SEQ ID NO: 398150 - RNA, 76 nt, Homo sapiens
cuccagcaucuagcaauuguccucuucccucacuguguuaggucucggggaggucauuguucaaugcuguuccgag

SEQ ID NO: 398151 - RNA, 77 nt, Homo sapiens
aagagaagacuaagcuuccacuguuuauuuagaacguuuaaggaaccagaaguggguagcugcugcuugacucucuu

SEQ ID NO: 398152 - RNA, 68 nt, Homo sapiens
cccugucucagguauuucuuuauagcaaugcaagaaugaacuaauacagugaauaucuggggcagugg

SEQ ID NO: 398153 - RNA, 62 nt, Homo sapiens
gcuguucuggagccgguucaaauggggucauaucgcccccgugugguaaaucucugaacagc

SEQ ID NO: 398154 - RNA, 111 nt, Homo sapiens
ggauauguguguccuguaguaguucagucagauauuuugauaugacuaucuuuuauguuaccaagcacaagagcuguuaauuaaauugggcuacugaaaauacacguguuc

SEQ ID NO: 398155 - RNA, 75 nt, Homo sapiens
ggugcccugagauugggauuguaaaugauuugagguuugucucaaacacuccauaucgcgauucucgggaccgcc

SEQ ID NO: 398156 - RNA, 55 nt, Homo sapiens
cuuuucuugugauucagcaaguaggaaacacucuuuuugcagaaucuaagaagag

SEQ ID NO: 398157 - RNA, 75 nt, Homo sapiens
cacucacuauggcagagucagaaagucaggcugcaguggccuggaccugcuuugacugcugccagaaagagagug

SEQ ID NO: 398158 - RNA, 59 nt, Homo sapiens
acaggcccagcuggccaggacuuccuaucccugcacugagucacuggcccagggcuugu

SEQ ID NO: 398159 - RNA, 84 nt, Homo sapiens
cacaucuuucaagugaacaaaaugaggagcaggagcagagaccgagccaugcccuuggugcuguuguucacuuacuuggaugug

SEQ ID NO: 398160 - RNA, 55 nt, Homo sapiens
gucuugaucuggaaacuggcgccaagucaucugcaccacauuccauugaucaggc

SEQ ID NO: 398161 - RNA, 63 nt, Homo sapiens
uuucuucuacaucagagaauucauaaagguggaaaacccuaugaauguaaggaguguaagaaa

SEQ ID NO: 398162 - RNA, 63 nt, Homo sapiens
cuauguguccacguguucucaucauuuaguucccacuccuaagugagaacaugugguauuugg

SEQ ID NO: 398163 - RNA, 94 nt, Homo sapiens
uucagaaaugauuguuagaauguagaauggaacugacuauagcugacuuggcucagcugaugggaguucuguguuaaaugacaaagauucugga

SEQ ID NO: 398164 - RNA, 57 nt, Homo sapiens
guccaggcagaggucugcuacaggggcaaagcccucauggagaaccucugcuagggc

SEQ ID NO: 398165 - RNA, 79 nt, Homo sapiens
uuuugggauagguagguaguuacacagcaauguaucuggaacauacacaucuggugugacugccagccccuuaccgaga

SEQ ID NO: 398166 - RNA, 78 nt, Homo sapiens
guccaaucaacucuguaggauccagguggacccagaaauggaaccagugaccaucuggagacugaccagaggcaggau

SEQ ID NO: 398167 - RNA, 95 nt, Homo sapiens
agaugcugcuuuaaguuguuuugagaugugguucaaggguguuuguugaucaaacaccaagagcuagcuauuaccaagaauaauaacuagcauuu

SEQ ID NO: 398168 - RNA, 80 nt, Homo sapiens
ucuguuuuugggugggauggcagaacugguugggccagauuacugguguggguagugucagcugauccauccagugcagg

SEQ ID NO: 398169 - RNA, 85 nt, Homo sapiens
uguuuccuugguugugcuucaacuucuaaaauauguuuuuucuaugaacauuuuaaugagggguuggacauaagacagaaaaaua

SEQ ID NO: 398170 - RNA, 91 nt, Homo sapiens
uuucugaguucugauuggucaaaacuugcugauuucugagugacugauucaggucaaagucuauuggcuaauucagggacauaaacagaaa

SEQ ID NO: 398171 - RNA, 57 nt, Homo sapiens
ugaucuuuugcagucuucaguggggucaauccccaacugagccuuuaaaugacuuca

SEQ ID NO: 398172 - RNA, 84 nt, Homo sapiens
ccugaagucuuuugaugaucucuggugguaaagacccuuguuucaaagucuuauuuaaagagaucauacuuccaagcacuuagg

SEQ ID NO: 398173 - RNA, 128 nt, Homo sapiens
ucuccgcaaccccugcauuuugcugggagguauuagguuggggcaaaaguaauggcagaaacagaaauuacuuucgccccaaccuaauaguuuucccccgucucaauuugccacaaagggugagaaga

SEQ ID NO: 398174 - RNA, 71 nt, Homo sapiens
auacuuuccuuuaggaagucaauuccuguuucaagcuaugcaucaggaagugucuucuuuuaggcaaguau

SEQ ID NO: 398175 - RNA, 98 nt, Homo sapiens
ugcauagauuugggcagacagagacauagauagguagauauagauagauagauaucuuauuggcucuguuucucugaagaaaccuaacacauccagca

SEQ ID NO: 398176 - RNA, 74 nt, Homo sapiens
uuguuccuucaguuauccagugaaagacaaauggauucagggaucccuguaaaucugguuaauuggauaaauaa

SEQ ID NO: 398177 - RNA, 55 nt, Homo sapiens
uugagauggagucucacuguguugcccaggcuggaguacaguggcuccaucucgg

SEQ ID NO: 398178 - RNA, 123 nt, Homo sapiens
aaauguauugugugugucuguucuaaugugucuggagucugacugacacaaggcacuccucuucuguuuugccuaagucagauccaaggccaaaaaaagcuuaaaaacauuucaaacccauuu

SEQ ID NO: 398179 - RNA, 69 nt, Homo sapiens
ccaguugaaaagcugguguugcugcucuguucucucuccaugagagcggugcacacuaccagcuucugg

SEQ ID NO: 398180 - RNA, 59 nt, Homo sapiens
uauggcuuuuaacugucguaugcaaggaauucccuuaucugacaguaggcagagccaug

SEQ ID NO: 398181 - RNA, 72 nt, Homo sapiens
ugucccaugguacugccacagaagagucucagcucucuccaggauucaguucuaaggucagugccuaagaua

SEQ ID NO: 398182 - RNA, 64 nt, Homo sapiens
aagcaauggcaauguaagucagaaaaauggaagugcuguuuuuggagaauuguauugccagcuu

SEQ ID NO: 398183 - RNA, 76 nt, Homo sapiens
ccuccccaggucagccugcgauguuuccccuuaguccucaugcguacugagcaucacaugggcugcuugggagagg

SEQ ID NO: 398184 - RNA, 78 nt, Homo sapiens
guccuucagauguuuuuguacuucauugucaugaaauccucuggaagcugacuagcagagugagaaacucugagggau

SEQ ID NO: 398185 - RNA, 97 nt, Homo sapiens
cugccaggguaguccugaccacagggggcccgcggguggcuugggagucaacccuccucagcaucacgugggcucccguggcucagugcuuugguag

SEQ ID NO: 398186 - RNA, 79 nt, Homo sapiens
ucauuuuuaccagccacucuaggugauucugaugccuguguucugguguacagaauugcagguguggcagggaagaugg

SEQ ID NO: 398187 - RNA, 86 nt, Homo sapiens
cccuaagaucuuugucucuguuuagagccagcaauuuugaaaucaccucacaguagccugucuuggaauagaugccuagauaaggg

SEQ ID NO: 398188 - RNA, 55 nt, Homo sapiens
cuggugcccucgcugaugagugggcacugaaggagcaccucagcgagggagccag

SEQ ID NO: 398189 - RNA, 72 nt, Homo sapiens
ggcuucuagguuugacucaagcaugagacaagucauggguggaugucucauugcaguuagaccugugggguc

SEQ ID NO: 398190 - RNA, 93 nt, Homo sapiens
uuuuuucaauuuuauuuuagauuugggguacaugcacagguuugcuaccuggcauauugcaugaugcugagauuugggauaugaaugaaagga

SEQ ID NO: 398191 - RNA, 55 nt, Homo sapiens
aggucuuucccuucccgugaggccauauuucaggcuaucacauggggagaaaccu

SEQ ID NO: 398192 - RNA, 68 nt, Homo sapiens
ggacaucacuaacaaucacagcucucauucaagccaugccuaugaugcugcaguuguugccaaugucc

SEQ ID NO: 398193 - RNA, 116 nt, Homo sapiens
gugcuaugaagccaucaugugagugcucaugggcagugugauuguuuaugugaguuacacgcauuuauuagcaaucauacagcuccuugggaacuuagcaugugggcaacaagcau

SEQ ID NO: 398194 - RNA, 55 nt, Homo sapiens
gguagacaucgugcucugugauccccaucgaggaaucucaggaauagauguuacu

SEQ ID NO: 398195 - RNA, 61 nt, Homo sapiens
aauacaagcaguccaacuccauauuccauaugcuuaacgaguaugaugaacugcuuguauu

SEQ ID NO: 398196 - RNA, 74 nt, Homo sapiens
uccaucccuuuauuuugagccuaugugugucuuugaacaugagaugggucuccugaauacagcacacugauggg

SEQ ID NO: 398197 - RNA, 79 nt, Homo sapiens
uggccacauuaggacuguguuucaaaagagcacaguggaaaaccacaaagcuucuugagacuuaggcuuuggaugguca

SEQ ID NO: 398198 - RNA, 72 nt, Homo sapiens
ggguuuucuuagagcacugaucugcucuuuaacaaaaauuuguaaaggguuauaaaggguuuaugagaaucu

SEQ ID NO: 398199 - RNA, 59 nt, Homo sapiens
uuuccacuuuguuauggggauauauguauuauuauuuaucucaaugcacagagaggaaa

SEQ ID NO: 398200 - RNA, 81 nt, Homo sapiens
ggcccaguaacaacuagguuuuuaaaauccagaaugaggcucugcgguucaccuggagacaugaagacugggucuggcgcc

SEQ ID NO: 398201 - RNA, 63 nt, Homo sapiens
ggaacugaggcuggggacagugaagcuaugcucaaagcucuuguucccuuccacucagucucc

SEQ ID NO: 398202 - RNA, 98 nt, Homo sapiens
caggguuugcuugguaggcacuguguuuguaggaguacagucuuaacugcuguaacaaaggggcuccaaaguacagugacuuaccaagagagaaguug

SEQ ID NO: 398203 - RNA, 71 nt, Homo sapiens
uugcaccaauucuaaacaguucuucacuuuguccuauuuuggguugggaguugaauuuagaauugcuguaa

SEQ ID NO: 398204 - RNA, 85 nt, Homo sapiens
gagaauugcuugaaccugagaggcggagguugcagugagccgagaucgcgccauugcacuccagccucggcaacgagcaaaauuc

SEQ ID NO: 398205 - RNA, 60 nt, Homo sapiens
uauugcaaauggugaucccaggaggccacuguagcuaauggugucccccaguuugcaaua

SEQ ID NO: 398206 - RNA, 59 nt, Homo sapiens
gguuuuccuaguaggccuauuagaaucacaggauucuaguaaugagaggcaggagaauc

SEQ ID NO: 398207 - RNA, 71 nt, Homo sapiens
ucucugaaccugaguuuccucaucgauaaaaaguggguaauccuacuuuguagagugugagaauucagaga

SEQ ID NO: 398208 - RNA, 60 nt, Homo sapiens
gugauuucuaacuuaaaaugaggggagauuugauuguuucuucuugaguuaacaaguuac

SEQ ID NO: 398209 - RNA, 76 nt, Homo sapiens
ucgcuugaaccugggaggcugagguugcagugagucaagcuuguuucacugcacuccagccuggguggcauagcga

SEQ ID NO: 398210 - RNA, 81 nt, Homo sapiens
aggugugaggugauaucucauugugguuuuaauuugcauuucacagaugauuaaugaugaugaguauuucuucauguaccu

SEQ ID NO: 398211 - RNA, 78 nt, Homo sapiens
ugguuuuugucguugguucuguuuauaugcuggauuacauuuauugauuugcauauguugaaccagccuugcauccca

SEQ ID NO: 398212 - RNA, 61 nt, Homo sapiens
auuaauagugcugugauaaacauauauguugugcaugugugucuuuaugguacuuuuuaau

SEQ ID NO: 398213 - RNA, 116 nt, Homo sapiens
aggauuuauauuuugaauacagguugaguaucccucaucuggaaugcuugggaccagaaguguuuccaguguuuggauuagggaugcucagccuguaguuuuaugugucaaguccu

SEQ ID NO: 398214 - RNA, 129 nt, Homo sapiens
ucugcauggcuggggaggccucaggaaacuuacagucauggcagaaggcaccucuucacaggacagcaggagagagaagugccuucugcugugaacguaaguuuccugaggccuccccaaccauucaga

SEQ ID NO: 398215 - RNA, 68 nt, Homo sapiens
cuugucagcaguggacagaaugguaggcucuagaucuuagacuaucuagcaaauucacugcccacaag

SEQ ID NO: 398216 - RNA, 84 nt, Homo sapiens
uggcugcauaaaugucuucuuuugagaagugucuguucauaucuaucacccacuuuuugauggggagaacauuuuugcaaucca

SEQ ID NO: 398217 - RNA, 103 nt, Homo sapiens
cugagacagaguuucgcgcugucgcccaggcuggaguacaguugugugaucucagcucacugcaacauccaccuccuggguucaagugauucuccugccucag

SEQ ID NO: 398218 - RNA, 67 nt, Homo sapiens
gcacccagcccucauucuccugguuuuugauaagaaauaugaagcugccaggcaugguggcuggugc

SEQ ID NO: 398219 - RNA, 64 nt, Homo sapiens
uaagcaaacacuagcuucccucagucauucagaucauggaugaaugccauucuguguuagcuua

SEQ ID NO: 398220 - RNA, 72 nt, Homo sapiens
ggacaugugagauuagcugagauccuuguggcugagguacaguucaacuccucucccuaguuucuuuaguuc

SEQ ID NO: 398221 - RNA, 85 nt, Homo sapiens
uuugagaccagguuaugagacugguuaauuuuuguauuuuuuuguagagacaggguuucaccauguuucccaggcuggucucaaa

SEQ ID NO: 398222 - RNA, 58 nt, Homo sapiens
guugcuauugugaauagugccacaauaaacauacgugugcauaugucuuuauggcagc

SEQ ID NO: 398223 - RNA, 86 nt, Homo sapiens
guuguagcaguguacaccuguggucccaguaacuuggcaagcugaagugaaaggauugcuugaaccuaggaguucaaggcugcaau

SEQ ID NO: 398224 - RNA, 128 nt, Homo sapiens
ccggauccugcuuugaagcaguggggaaagggaagcccagugguugggccggagacggggcuaggggugcacccuucgucccggucagcucuugcggcugccuacguuccuucaccugccaggaccgg

SEQ ID NO: 398225 - RNA, 81 nt, Homo sapiens
ugaguuguuauuaggcuuuuguuuuggucucagguauaugacacaauaucaccuguggccagaaagaaggcaagaaacuca

SEQ ID NO: 398226 - RNA, 102 nt, Homo sapiens
ggugugguagcacaugccuguauucucagcuucucgagaggcugaggugggaggaucacuugagcccuggaggcagaggcuacagugagcuaugaucacgcc

SEQ ID NO: 398227 - RNA, 73 nt, Homo sapiens
aguggagucagguggagacagaucuucaguugacaaagccacccugacacgauucuucacuuuucacuucacu

SEQ ID NO: 398228 - RNA, 68 nt, Homo sapiens
uagguuauuugcauaucuucauuauugugaauaaugcugcagugaacaaagaagugcagauacauuua

SEQ ID NO: 398229 - RNA, 99 nt, Homo sapiens
gagcugccagcauggcuagaaugaagcagguaggagaaauuggagagacuagacuuguugagucuuccagccuccaucuuucucccaugcuggaugcuu

SEQ ID NO: 398230 - RNA, 63 nt, Homo sapiens
uuucaucuaacaugacuguaugcguagacccaguggagauuucaagcagacauuuggaugaaa

SEQ ID NO: 398231 - RNA, 59 nt, Homo sapiens
cugaggaaguucuuuaacaguucuugcaggacauaucuacugcuaaugaauucccucag

SEQ ID NO: 398232 - RNA, 95 nt, Homo sapiens
uuguuuuuggcucaguuugugugugugugugugugugugugugugugugugcacgugcaugcacacacaugcgcuacaguaucagccgaauguga

SEQ ID NO: 398233 - RNA, 85 nt, Homo sapiens
ggggacaugagaaucauuucagcuuguaaugaguggcuacuucaauaauaagcucaauacauuuuuguuguguuguuauuucucc

SEQ ID NO: 398234 - RNA, 63 nt, Homo sapiens
uacaguaaauuucugugcuuucauagagaaaagauauugugggggcacugggaauuuauggug

SEQ ID NO: 398235 - RNA, 73 nt, Homo sapiens
guaaauuuucagucuguguguacguuuauagaugaacuauguuuauuguaaucaacacaucauugggaauugc

SEQ ID NO: 398236 - RNA, 130 nt, Homo sapiens
ccaaaauaguuucauuuagcuauacuucuggcuucgucccuuuuggaauccucuuagcuuaugacugauagggcuaugaggagaugauuuaagucuguguaccacuucuaaucuuuacuuacuuuuuugg

SEQ ID NO: 398237 - RNA, 65 nt, Homo sapiens
caguguugaggucuucaggaucaggcucugggucuucagaaaccggguccagaucuucaggauug

SEQ ID NO: 398238 - RNA, 64 nt, Homo sapiens
augagauuuggaggggccaggggcagaaugauauggcuuggaucugguccccaccaaaucucau

SEQ ID NO: 398239 - RNA, 55 nt, Homo sapiens
ccagugaacugcaagguuuuucccacuggcuggugagaaugugaacuguuccugg

SEQ ID NO: 398240 - RNA, 112 nt, Homo sapiens
gaggccucuguucuguuucauuggucuauaugucuguuuugguaccaguaccaagcuguuuugguuacuauagacuuguaguauaguuugaagucagguagugugaugccuc

SEQ ID NO: 398241 - RNA, 69 nt, Homo sapiens
cuugacagggcugcuauuguuuaaaaguuauuuugccgaaauugcuagaugaaaaugguaccuugcaag

SEQ ID NO: 398242 - RNA, 70 nt, Homo sapiens
uugcugguuuuaugauauuuaauuuuuaaacuagaaaauccugaucugagaaagugucauaacauagcaa

SEQ ID NO: 398243 - RNA, 89 nt, Homo sapiens
ggguuuuggaagggcucugucuuaguuugggguggggauaguuggagcugauuauguguaccucaaucugaggccuuuccucaaaaucc

SEQ ID NO: 398244 - RNA, 97 nt, Homo sapiens
ccaugucuggaggccaggaggggaggauggggucuguugagggccgcacugcauucccucgagaaaccaucugcugaaggccugaccuccagcaugg

SEQ ID NO: 398245 - RNA, 86 nt, Homo sapiens
uuuagauaccucacguaaguggaauaauacaguauuuauucuucugugucuggcuuaucucacuuaccauguguccucuaucuagg

SEQ ID NO: 398246 - RNA, 75 nt, Homo sapiens
agguguguagugguaucucauuguuuuauugccaauucccugaugacacauaauguugaguaucuuuacacaucu

SEQ ID NO: 398247 - RNA, 83 nt, Homo sapiens
uuuuagacaagaaauuucaauauuauuuucagguccugguauacguggugaugaaaguuauauugugaaauucaauucuggaa

SEQ ID NO: 398248 - RNA, 81 nt, Homo sapiens
cccucagauuuuuugagaucuauacuuuaugccagaagaaagaagaaaauggaauagcagguauuuaagaaacucagaggg

SEQ ID NO: 398249 - RNA, 88 nt, Homo sapiens
augaagcugcuuccaucagugaaauauuuaacguccaggucccugaggggccuaucugucaaauuucucuggccugagaacacuucau

SEQ ID NO: 398250 - RNA, 73 nt, Homo sapiens
uggcuuaguggaaggaacugaguaauuaaaucgaauaugucuaauuacucgugucuuuacugcuucauugcca

SEQ ID NO: 398251 - RNA, 59 nt, Homo sapiens
ucucagcacaaacaaaauugcuuguaaaggagcaaggcaauugcacaaugugcuguagg

SEQ ID NO: 398252 - RNA, 62 nt, Homo sapiens
ggaugacucuaggggccucccaagggcuuuccacauccccuuuggucccucucaagucauuc

SEQ ID NO: 398253 - RNA, 66 nt, Homo sapiens
gcugagcuagaccacuuggcuccccggguucagccccuucuaggggagugaaugguucugucuugc

SEQ ID NO: 398254 - RNA, 84 nt, Homo sapiens
ugggucaaaugguauuucuaguucuagaucccugaggaaucaccacacugucuuccacaaugguugaacuaguuuacagaccca

SEQ ID NO: 398255 - RNA, 56 nt, Homo sapiens
ucacacugucuugguuacucuugcucugugguacauuuugaaaucaggaaguguga

SEQ ID NO: 398256 - RNA, 62 nt, Homo sapiens
uucucugguggaagcagggggcaaaaaccaauggauguugcucacugacccagcuagcagaa

SEQ ID NO: 398257 - RNA, 64 nt, Homo sapiens
guaaucucagcuacucaggaggcugaggcacuagacucgcuugaaccugggaggcggagguugc

SEQ ID NO: 398258 - RNA, 76 nt, Homo sapiens
uuccuauucauuuuuaaacucaaauuauagccaacauuuuugcuuuuaggcuguaagcauuauaaagagauaggga

SEQ ID NO: 398259 - RNA, 55 nt, Homo sapiens
uaaguaaaguagggcaggcaccaaaagacaaacuuugcauguccucacuuacuug

SEQ ID NO: 398260 - RNA, 87 nt, Homo sapiens
guggcacaugacuguaguuucagcuacuugggaggcugaagugggaagaucacuugagccuaggagguugaggcugcagugagccau

SEQ ID NO: 398261 - RNA, 67 nt, Homo sapiens
agugucccucaguagucaugaguaaacuuuuuaaaaaaaagugguuuuucagacuuugagagagacu

SEQ ID NO: 398262 - RNA, 75 nt, Homo sapiens
ugcuuugucugugcauguuguccaauucuuuguucaagacaccaagaaccuggacaccauccaccaguaacagua

SEQ ID NO: 398263 - RNA, 56 nt, Homo sapiens
gaggcuuuucucugugccucacguaucuggucuuugagguagggauuaaagaccuc

SEQ ID NO: 398264 - RNA, 76 nt, Homo sapiens
gaaccuucuuccaugaauuaguuaccucugugaaccccaaauaucugagacaggucuuaguucauuuagaagguuu

SEQ ID NO: 398265 - RNA, 101 nt, Homo sapiens
cuuauguguauauuaauagcauaugcaucuuugaguuauugugcagacugaaugacaucaucugcacaaaugauucacaagaaugccugcuucacaauaag

SEQ ID NO: 398266 - RNA, 65 nt, Homo sapiens
ccuccccauacaccacacaaacugugcaugcaugugguguguacaugugcaggucuguggggggg

SEQ ID NO: 398267 - RNA, 68 nt, Homo sapiens
aagucaucuugcauucuucagaucacaguggaagaauuucaccauguguucagaaggauugcugauuu

SEQ ID NO: 398268 - RNA, 58 nt, Homo sapiens
gauggccuucggugggccacugcauaaauggauguuucugcaguauugaaggccaguc

SEQ ID NO: 398269 - RNA, 56 nt, Homo sapiens
uccacagacucaugcuccugaagcaagccacaugugugguggcaugaggguguggg

SEQ ID NO: 398270 - RNA, 56 nt, Homo sapiens
acccgggaggcagagguugcagugagccgagauugcaccacuacacacucuugggu

SEQ ID NO: 398271 - RNA, 101 nt, Homo sapiens
auguaguugagcgguuuugagugaguuucuuaaucccgaguuguaguuugauugcacuguggucugagagacaguuuguuauaauuucuguucuuuuacau

SEQ ID NO: 398272 - RNA, 76 nt, Homo sapiens
auguauaaucuuaguuuagauuagcaauucgggaucucuuuuucccugaauucuaaccauuaagccaagcaagcau

SEQ ID NO: 398273 - RNA, 62 nt, Homo sapiens
uaucucagggauauucugcuaugaacggaauguaguugugaaugguacugucucuggagaua

SEQ ID NO: 398274 - RNA, 83 nt, Homo sapiens
uggcaggcuagagucucucauuaaucuguauuuucauuuuaaaaugaguacuuugcauuaguaaguaauuuuaauuuuugcca

SEQ ID NO: 398275 - RNA, 91 nt, Homo sapiens
ggagaaucgcuugaaccugggaggcucggagguugcagugagccgagauugugccauugcacuccagccuaggcaacaaaagcaaaacucc

SEQ ID NO: 398276 - RNA, 57 nt, Homo sapiens
ucauggggugagcuacaggcacacggggcacaagugcagucugaguggcaccuguga

SEQ ID NO: 398277 - RNA, 77 nt, Homo sapiens
auauugcaucuuugagcauuagggcaaaggcaagacccucugcuccuugucugcccuaaugcucaaagaugcaauau

SEQ ID NO: 398278 - RNA, 64 nt, Homo sapiens
cucuuggguagauuuugcagagugggcacauacucauggaggguucuguugaucugccuaaggg

SEQ ID NO: 398279 - RNA, 82 nt, Homo sapiens
ucuauugugcuauggccugaauguuuguguccccaaaaaauacauacacugaagacuaaccaccaaggugauagcauuaaga

SEQ ID NO: 398280 - RNA, 58 nt, Homo sapiens
ugagcugagaucuuaccacugcacuccagucugggugacagagugagaccuugucuca

SEQ ID NO: 398281 - RNA, 81 nt, Homo sapiens
uccugugacgggcgagcuuuuggcccggguuauaccugaugcucacguauaagacgagcaaaaagcuuguuggucagagga

SEQ ID NO: 398282 - RNA, 73 nt, Homo sapiens
guagaacuuucaggaguuuccuuuaguuucuggggccuugguucuugaacaaagagauuccauuaucuucuac

SEQ ID NO: 398283 - RNA, 89 nt, Homo sapiens
uuaggguuuaguuuauucagauuuucuuuguaucugagaccagcuuucaucagaaugcauggcagagucaggguacacugcagcucuga

SEQ ID NO: 398284 - RNA, 99 nt, Homo sapiens
ucagagaaauuuacccugugagauuaucuguacauaggagcuuauagagguuucugcaacacagagauuucauucaaugaccagaguuuauuucucuga

SEQ ID NO: 398285 - RNA, 76 nt, Homo sapiens
agcugaccacgcugaccggcaccauguagugauucccuggaauucuacaugggucgucggugagguccauaaaguu

SEQ ID NO: 398286 - RNA, 119 nt, Homo sapiens
uaaauuccuuuaauagauauagggauacucugguuauauauuucuucaugaguaaucuuugguaguugaugucuuucauggaauauugaccauuuuaucuaaguuguugagcuuauuua

SEQ ID NO: 398287 - RNA, 55 nt, Homo sapiens
uauggagggcugacuguacuuuuaagaugcaaguuugaaguguuuguucuccaug

SEQ ID NO: 398288 - RNA, 129 nt, Homo sapiens
agaaauaaacaguaaguacaaguuaaugguugucuugagagaggacaugacugaggagaaauacacaaguauuaguuaaggucuguuucuuaagaugaguaguggaccuauauugucuguuuuaguuuu

SEQ ID NO: 398289 - RNA, 71 nt, Homo sapiens
aagauuagauggcugugcguggcuuuauuucuggauucucuauucuguuccauugcauacuaucugauuuu

SEQ ID NO: 398290 - RNA, 63 nt, Homo sapiens
aaagggcuaucacaggugacauguaaugguuuguuuuuacccauuucaauguggauguucuuu

SEQ ID NO: 398291 - RNA, 85 nt, Homo sapiens
aaauuagcugggugaggugaugcaugccuguagucccagcuacucagaaggcuaaggcaggagcauugcuugagcccaggaguuu

SEQ ID NO: 398292 - RNA, 60 nt, Homo sapiens
auuucugcuggcagguguguuauaaagguguuuggucuucuuggcaaugucagcagagau

SEQ ID NO: 398293 - RNA, 96 nt, Homo sapiens
ccuacauuagagcugugagcagaaguuuugauuggcgucaggugcuacauuuuucagacgccaagauuuguugcucauucgguggugugauauggg

SEQ ID NO: 398294 - RNA, 94 nt, Homo sapiens
agucaaacuugagguuuauggaggagguaggaauugugcuaggacugaagcauuuggaccugggcucaaguccugccuccuucucauaauggcu

SEQ ID NO: 398295 - RNA, 94 nt, Homo sapiens
guuauuauucauggcuauccccuaaugacucaaauaucagcacccauaggggugaugauauuugagucauuagaaaauaguagugaauaauaac

SEQ ID NO: 398296 - RNA, 84 nt, Homo sapiens
auuuuuaugacguuuuauuggcgcaguuguuacuucuucuccucugcuguaauaaugugccauaaaguagaauuucauuuaaau

SEQ ID NO: 398297 - RNA, 82 nt, Homo sapiens
caugcacagugauaucugaagaauuauugcuuccuuuccaauaucauuccacaagcauuauugagaugauccugcaugcaug

SEQ ID NO: 398298 - RNA, 91 nt, Homo sapiens
uuugagucauuguggaaagaguaggggucccauuugccauggcauaugcuugcgacauguggguccccuacucuuuccacagugacucaaa

SEQ ID NO: 398299 - RNA, 56 nt, Homo sapiens
gcuuucuccacuaauguagcagauaucaaaaguucuggauuacaggugcugagagu

SEQ ID NO: 398300 - RNA, 78 nt, Homo sapiens
ucugauuuauucuccacaguaaucacacaagguagucauuucuugcuccauuuuacagguggagaaguaaggcucaga

SEQ ID NO: 398301 - RNA, 74 nt, Homo sapiens
uggauguccaaagugccugacucauaguuagcacuccauaaagguuaacuauuauuagcaucuuugacauucca

SEQ ID NO: 398302 - RNA, 66 nt, Homo sapiens
ccagccaagcucagacggauccgaugaucuuucugaaucagagcccucugagcuucagcaggcugg

SEQ ID NO: 398303 - RNA, 74 nt, Homo sapiens
gagaugaacauaggauuuuaaguguuugauugugucccaauucacuuguggcagauccuuacagccaucauuuc

SEQ ID NO: 398304 - RNA, 72 nt, Homo sapiens
cccuucccaauaagugguucuagaauugaguauccuaaguuaggauaaucucuggaccauuguccaagaggg

SEQ ID NO: 398305 - RNA, 67 nt, Homo sapiens
agucuuugccuguuaacauagcauauuaugguaauauggugguauguaugauuaacauggauugacu

SEQ ID NO: 398306 - RNA, 111 nt, Homo sapiens
gucucagaacuguggcauauucuauugaacuggaucagaaggccuucuguccuuguggauaauuguggucuugcuuuuaguuuuuauagauuacuucaauauuucucaggc

SEQ ID NO: 398307 - RNA, 107 nt, Homo sapiens
gaugggggucucacuaugcugcccaggcuggagugcaauggcuauucacagguggaaucaccaugcacuacagccuugaaauccugggcucaagugauccuccuguc

SEQ ID NO: 398308 - RNA, 60 nt, Homo sapiens
gucuacaaguauuuuuauuagugccugccacguguuggcauuguucaaaaugcuugggau

SEQ ID NO: 398309 - RNA, 88 nt, Homo sapiens
cuguacucugaacuuguaacguaaugucaaaaucuauuguuuauaauaaaagaacuggcuuuauguuauuuuguuucugagaaugcag

SEQ ID NO: 398310 - RNA, 75 nt, Homo sapiens
uaguuacagucacaauuuguaccuuuuucuccacuccaaacugagacuaagagggaaauuguuggcugcuaacug

SEQ ID NO: 398311 - RNA, 88 nt, Homo sapiens
ggcuguauggaaauaguaguguaaaucaaucuguugucuuaguuuuugaggugacaagguggauuuacuuauaacacuuucuccagcc

SEQ ID NO: 398312 - RNA, 78 nt, Homo sapiens
gggcucuugaguucuaguucagaugcacacuguagucuaucccuggaccacaaugcauuugagccucaagaaaugccu

SEQ ID NO: 398313 - RNA, 66 nt, Homo sapiens
ugacaaagggcaguggcucgcuaacacuaacaugaauuuaaggcccagcaucauugcaauuuguca

SEQ ID NO: 398314 - RNA, 67 nt, Homo sapiens
gauaagucaauggaacagauuaagaggacagaaauaaacccuuacauuuauagucaguugacuuauu

SEQ ID NO: 398315 - RNA, 75 nt, Homo sapiens
ggggcccgcccugugcuaggguuuucagcaggagugaaugagcugcugugagacugacagggcagggugugcucc

SEQ ID NO: 398316 - RNA, 64 nt, Homo sapiens
agggucacuuccagacagugccauggcauuuguaagcuguaauggcccuggugggagugucuuu

SEQ ID NO: 398317 - RNA, 88 nt, Homo sapiens
ggguugguuccaagucuuugcuauugugaauagugccgcaauaaacauacgugugcagaugucuuuauaguagcaugauucacaaccc

SEQ ID NO: 398318 - RNA, 75 nt, Homo sapiens
gcuccccuaucacuguaaguuuacacuuuguagcuaauuuagcuacaaaguguaaacuuacagugacaggagagu

SEQ ID NO: 398319 - RNA, 59 nt, Homo sapiens
gucugguuccugggagauuucuagagcuaugagcauuuacucccacuugugagcaaggc

SEQ ID NO: 398320 - RNA, 75 nt, Homo sapiens
agaagguaagcaccauauuguuuuucccaggagucuagagcagccauuuuugagcuugugaagaacauaccuuuu

SEQ ID NO: 398321 - RNA, 62 nt, Homo sapiens
ccauucagaugccugagaacagcuaagcuccguaaaguugguucucuuagccaucuuaaugg

SEQ ID NO: 398322 - RNA, 59 nt, Homo sapiens
gauaacuuccagacguugccauggcauuuguaaacugucauggcccugcugggaguguc

SEQ ID NO: 398323 - RNA, 67 nt, Homo sapiens
gcaaggauagcagccauucuuuuuauuuguuaaaugucuuuuaagugggagaauaucugcuaugugc

SEQ ID NO: 398324 - RNA, 62 nt, Homo sapiens
cuguccacuuuugugcugaauuggagccucucuuugaccucuuucuagcauagaaauggcag

SEQ ID NO: 398325 - RNA, 61 nt, Homo sapiens
uuaaagugaucauaaggauagucugucuggugauggacuagcacuucuaugagcauuuuag

SEQ ID NO: 398326 - RNA, 66 nt, Homo sapiens
uugagccuaugugugucuuugcucaugagaugggucuccugaauacagcacacccaugggucuuga

SEQ ID NO: 398327 - RNA, 84 nt, Homo sapiens
agugccugauacacgguaggcacauauuuauuuguucagccauuuaacaaacauuuagggagcaccugcugugugccaggcacu

SEQ ID NO: 398328 - RNA, 78 nt, Homo sapiens
cuccucuggguucuugggugaaggucacacuugcauucauaggacagcauucaugacagucaccaggacccacaggag

SEQ ID NO: 398329 - RNA, 80 nt, Homo sapiens
uccagucacaucagaaaguugagugcugaucugauuauuucacuuaauugcauaaaauucaacucugugacaucccugga

SEQ ID NO: 398330 - RNA, 63 nt, Homo sapiens
guuuuauucaauacagguuguacuagucccuucuugaagugccuacuugaauuguagugaaau

SEQ ID NO: 398331 - RNA, 72 nt, Homo sapiens
guccaaaugagcuuguaugacuguuugcucauucaggucuugcagcagccuugagugguagacauuauggac

SEQ ID NO: 398332 - RNA, 84 nt, Homo sapiens
guuaguuucuagguagcuuuucugucauguuuacaacuuacaagaaguagaguauauggaugaaaauuacugggaaaagcuagc

SEQ ID NO: 398333 - RNA, 69 nt, Homo sapiens
uguugccuaggcuggagugcaguggugcgaucucgguucacugcaaccucugccucccagguucaagca

SEQ ID NO: 398334 - RNA, 130 nt, Homo sapiens
ugaggguugucaaggacacucaggcaggauuugacccaaaagagaugaagguccugacuguacuccaguauggcugcagcauaaucagauuuuccucucucucugucacugucucagaaagcagccuuca

SEQ ID NO: 398335 - RNA, 97 nt, Homo sapiens
aggcaggaggaucgcuugagcccaggaggcugaggcuguagugagcugugaucaugccacugcacuucagccugggcaauagggugagacccugucu

SEQ ID NO: 398336 - RNA, 55 nt, Homo sapiens
cagggcccuaagauacacaucagaaacaaacguccucauugugucuugggcccug

SEQ ID NO: 398337 - RNA, 75 nt, Homo sapiens
cuguuuucuggguucccugaugagaguuaguuccuuuuagggacuaauucguccuagggaggacuagauuaauag

SEQ ID NO: 398338 - RNA, 94 nt, Homo sapiens
aguacacauaguguuuagaacagugcauggcacacaguaauugcuuagugaauguuuacugucaucauuucuaugugccaggcacuaugguacu

SEQ ID NO: 398339 - RNA, 83 nt, Homo sapiens
gauuccaauggaccaauauggcuugugacccaugcuucauuuaccuaaaugaggccacaaggcucugugaucacguggcaguc

SEQ ID NO: 398340 - RNA, 91 nt, Homo sapiens
ggucagggcauuugaacuaauaacugugcuggcaccuauuacuggugcuuguauuaucuuaggcaaguugcuauucuuuaaugccuugauu

SEQ ID NO: 398341 - RNA, 63 nt, Homo sapiens
cuauguguccauguguucucauaauuuagcucccacuuauaagugagaacaugugguauuugg

SEQ ID NO: 398342 - RNA, 61 nt, Homo sapiens
aagagauggcucuuucuagacuuaauuauaagcuuaguaguccauuggagagucaauucuu

SEQ ID NO: 398343 - RNA, 65 nt, Homo sapiens
caugagcaucuuugauaaauuucaugacaauaacugaacuugaaaugucugagauguggcucaug

SEQ ID NO: 398344 - RNA, 62 nt, Homo sapiens
uuggauccaucuggaaaugugggacaaccaggguggggcuuccaagucauagauggauucaa

SEQ ID NO: 398345 - RNA, 80 nt, Homo sapiens
aguacuuaccugauaggacuauugugaggauuaaaugggauaaaacacuuaaacacuuuauauagucccugguaagugcu

SEQ ID NO: 398346 - RNA, 65 nt, Homo sapiens
aggaaaagagacuggaagaaaaucacgccaucuguaggcaaugggugguuuuucucuuccuuccu

SEQ ID NO: 398347 - RNA, 59 nt, Homo sapiens
aacugguauuucccaugaauuuguaugguauaguacaaguaacagggauaauagcaguu

SEQ ID NO: 398348 - RNA, 92 nt, Homo sapiens
aaaugucuggaaaaccuauuugagauuuuccucaaauauuuccuauuugagggaauaacugaagaaaaauucacuagugcugccagagauuu

SEQ ID NO: 398349 - RNA, 74 nt, Homo sapiens
cuuuugaaaacugcugggcuauuacuuacacacauuaaacauaugccuacugaugacccugcaguucucaagag

SEQ ID NO: 398350 - RNA, 68 nt, Homo sapiens
ugauaucuuuuguauggugagcugcacauuuaauaaagaagcagcugccacuacugaacgauuaauca

SEQ ID NO: 398351 - RNA, 64 nt, Homo sapiens
gcccuaaaguagaauaaccuuuucuuucuccaugaauggaauguaaguuauguuugcugagggc

SEQ ID NO: 398352 - RNA, 102 nt, Homo sapiens
aaugguaaaaucuuaacaacuaugguuuaguuaauaguauuguaccaaugcuaucaucuuaguuuugaucacuguacuaugacuauguaggauauuaacauu

SEQ ID NO: 398353 - RNA, 92 nt, Homo sapiens
guguauuaaagagcuugaccacugggcacaguaagugugccugagaagaggagaacuacuaauugugcuuaugguuuuguucuuagauauac

SEQ ID NO: 398354 - RNA, 81 nt, Homo sapiens
gccccugauggaaugguguggcaaguuauaaucugcuaucaacacaaugcacaucacuguccacucaucuuucucuggggu

SEQ ID NO: 398355 - RNA, 58 nt, Homo sapiens
gguugguggcaguaacgguggaucugaggagagccgagagcaucguuguguuauagcc

SEQ ID NO: 398356 - RNA, 65 nt, Homo sapiens
augauguuaaguaggaaucccauuucgguuuucucuguagugugggucaguuuuucugacaucau

SEQ ID NO: 398357 - RNA, 129 nt, Homo sapiens
cauuguugacauuuugagcugggggugggagggcuguccugugcauuguaggguaauuaacaguguccugggauuguacccacuagaugccaguggcacccccuuccccaguuucaacaaccaaaaaug

SEQ ID NO: 398358 - RNA, 87 nt, Homo sapiens
ugcucuuuugauauguuauugaauuugguuugcuaagaauuccuugaggaguuuugcauccauauucauuagugauauugaacugua

SEQ ID NO: 398359 - RNA, 74 nt, Homo sapiens
ucauucucaauggcccugaguucaauauauuauuaacagcaguauuuuaaaacuuaggguugaacugggcaugg

SEQ ID NO: 398360 - RNA, 55 nt, Homo sapiens
cggagauauuuaagguucucuccauguaaggacauuagaaucuaaauuauuucug

SEQ ID NO: 398361 - RNA, 61 nt, Homo sapiens
uuuccauguuggugaaaugaggaaaaaucccacccuccccagguuucauuaagauaggaaa

SEQ ID NO: 398362 - RNA, 91 nt, Homo sapiens
ggguuuguauaaggcugaguauguccuguuuuuaagguucauaggcucuaggcuuauucuuuaaaaaauagggguggccuuucauauuccc

SEQ ID NO: 398363 - RNA, 62 nt, Homo sapiens
uuuaagguauguggugaaaauucuggaauaggaagacgggaaacacucacauaagcuuuaga

SEQ ID NO: 398364 - RNA, 77 nt, Homo sapiens
ggacugaggccagguugccaaacugcggagagugggguuggagggcuuucauggcaguuuggggccugcuugugucc

SEQ ID NO: 398365 - RNA, 64 nt, Homo sapiens
auugugaauagugcugcaauaaacauacaugugcaugugucuuuaaagcagcaugauuuauagu

SEQ ID NO: 398366 - RNA, 68 nt, Homo sapiens
ggguauaugugcacaucgugcagguuuguuacauauguauacaugugccauguuggugugcugcaccc

SEQ ID NO: 398367 - RNA, 81 nt, Homo sapiens
ucuugaugguugagcuucauuguuaugaaugucaaagacuaauuugcauuuaagaaaacaugagucuacaauaacucagga

SEQ ID NO: 398368 - RNA, 84 nt, Homo sapiens
ugacauugacacugucauugucaauugacaauugucauugucaauugucaaugacaaugucauugacauugacauugucaguca

SEQ ID NO: 398369 - RNA, 69 nt, Homo sapiens
ugggauacaagcagagguagggugugcaguuucugagaagugcauugcaucucugcuucaauccuccca

SEQ ID NO: 398370 - RNA, 102 nt, Homo sapiens
ucucucucucucccacuguaaaacugauugaggugcuuaagguucucaagaaauugcuacucauagcccugugauuacuuuuauaaaggcgggggggagggg

SEQ ID NO: 398371 - RNA, 70 nt, Homo sapiens
uaucacauguuuucacuuccaugugggagcuuaaaaaguuaaucucauggagguagagaguaaaaugaua

SEQ ID NO: 398372 - RNA, 55 nt, Homo sapiens
guguccauguguucucaucauuuagcucccacuuacaagugagaacaugugauau

SEQ ID NO: 398373 - RNA, 99 nt, Homo sapiens
ccugaauuugaauauuggccugacuugcuagauugggaaguucuggauauccuucagaguguuuuccaacuugguuccguucucccugucacuuucagg

SEQ ID NO: 398374 - RNA, 64 nt, Homo sapiens
uugcuuuguuacugcaguuuccacucuuucagcuccagcugggcugacugcagcugcagggcag

SEQ ID NO: 398375 - RNA, 77 nt, Homo sapiens
aaaggcuacuauacugaagcaaauuaacauguuuguaaucucacauaguuacugcuauaguuuggauauuugccuuu

SEQ ID NO: 398376 - RNA, 69 nt, Homo sapiens
ggggaggaugaucuugugugugccaggcuggugcccuccaacuggcauguuuuaaggcuuaaccacccc

SEQ ID NO: 398377 - RNA, 74 nt, Homo sapiens
guggugcaagcuguugguggaucuaccauucuagcaucuggaggaugguaggccucuucucauagcuccauuac

SEQ ID NO: 398378 - RNA, 59 nt, Homo sapiens
gucaauauauuucuuacccaauuuuaacucccuggagauggagugaagaguuuauugac

SEQ ID NO: 398379 - RNA, 103 nt, Homo sapiens
uucuuuaugggugguuuuaaauuauugauucaagcucuucacugguuaugggccuaugaagacucauacuugaaucaguuucagcaguuuguguuuccaggaa

SEQ ID NO: 398380 - RNA, 55 nt, Homo sapiens
uacaaagcuuugaugugucuuugguggagauuauaugacauauugaaguuuugug

SEQ ID NO: 398381 - RNA, 58 nt, Homo sapiens
ggcuggugacccugugguggugacacuagagcccacccauucacggggagcagcagcc

SEQ ID NO: 398382 - RNA, 78 nt, Homo sapiens
agugucuugauacuguuuuugagaauaguaaugcuucaaauauuuggagcaccauuucucuaaagcacucaaaacgcu

SEQ ID NO: 398383 - RNA, 63 nt, Homo sapiens
ugcuccuggcucaucacacuaacagcagccaacguguguuuagugcuuacgaugagcuaagca

SEQ ID NO: 398384 - RNA, 130 nt, Homo sapiens
uuuuuuuuuuuuugcuaucuggauaguugacauuggacuucauguuucuauuagcucacggaaggaggccugugggaucagucuggaauauugauuccuguggggguguaugggugcaagaaaaggagag

SEQ ID NO: 398385 - RNA, 55 nt, Homo sapiens
cagacagcucagguagaaccaaaguagcccuuggguuuuggcuuaaagcagucug

SEQ ID NO: 398386 - RNA, 61 nt, Homo sapiens
ggagcugguaagaucugugagccaggcucuuggugggaccucagcucacucugccgucucu

SEQ ID NO: 398387 - RNA, 78 nt, Homo sapiens
guguugcccauaggaagaauugugacauaucacugaacccagaaccuaugugaugugacuuuuuccugugccuuacau

SEQ ID NO: 398388 - RNA, 61 nt, Homo sapiens
uuauugagguauacuuugcauaucaugaaaugcaaccauuguuaagugugcaacucaguga

SEQ ID NO: 398389 - RNA, 130 nt, Homo sapiens
caaaccugaaaauccaaaaugcuccaaaaucuaaaacuuucugagugcagcaugaugacucaaagaaaaugcccacuggaguuugcuagaaacguuuugcagcauuuugaaucugugauuuuuggauuug

SEQ ID NO: 398390 - RNA, 102 nt, Homo sapiens
gaguacaacauuuauaaaugagaacugacucagacacauguauaugcuuguguauauguguguguguaugcaugugucuguguuuauguauguauguaucuc

SEQ ID NO: 398391 - RNA, 59 nt, Homo sapiens
cuucuugcuguguccucacauggccuuucuguggaguguguguugugcauugcagggag

SEQ ID NO: 398392 - RNA, 63 nt, Homo sapiens
ggguugcaugggagcugggugaggccugugacuguaggcuuucccccacuucccugacaaccu

SEQ ID NO: 398393 - RNA, 86 nt, Homo sapiens
guuacuucucuguggcaguuuguuugugagguccagauuauguuacuaucuaucucacagguaacuguaggcucacaugagagaac

SEQ ID NO: 398394 - RNA, 70 nt, Homo sapiens
gguuugcaauuucaguuaugauggcuucacugagaaaacaugaagaucuuaggagcugagggagcaagcc

SEQ ID NO: 398395 - RNA, 59 nt, Homo sapiens
ucuuggcauggcugaagauuccaccauuucucacaagaagaaucucaucugugccaaga

SEQ ID NO: 398396 - RNA, 64 nt, Homo sapiens
ucugauagaugugaccuguagaugaucaguuucaaaacauauuuauacguugucauuuaucagg

SEQ ID NO: 398397 - RNA, 64 nt, Homo sapiens
ugugugacuguggauugagaggagguaggguuaagucuuaauuccaccauugacuaguuacaua

SEQ ID NO: 398398 - RNA, 56 nt, Homo sapiens
gugaacuaaggauucaaacuucagauuucaaaguccaaagugaaugcuuuguucac

SEQ ID NO: 398399 - RNA, 81 nt, Homo sapiens
agaggaaugagguguuuauuguauccugaaggagcucacagggaggaagcaugcaggaaaauaaauaccgacaaagucucu

SEQ ID NO: 398400 - RNA, 75 nt, Homo sapiens
uauagauuaauuaugagaagucaauuguuguuauuaacuaauaauaauguuaggcuuacucaaaaguugucuaug

SEQ ID NO: 398401 - RNA, 74 nt, Homo sapiens
ggggaaguugugucuugcuggugccugcauucaguuaacucuuuagugcaagaccaucaggaaaugaccucucc

SEQ ID NO: 398402 - RNA, 77 nt, Homo sapiens
uucauuuaauaaaguucugcuggcauauaugauguuucucuaaauugguugcuacuuaggagcuuuauucuaaugga

SEQ ID NO: 398403 - RNA, 117 nt, Homo sapiens
acaagauucagugcacagguauaaugcauauuuugauggugaaauuaguuaauuguugguaaacacuuagaacagugcucaccacaaaguaaauggguauuaagugugcauuuuugu

SEQ ID NO: 398404 - RNA, 76 nt, Homo sapiens
aguuuaaaauguauggauauuuuuugaacauagagccuacacucaaguuuuauguaauguucauucauaaagagcu

SEQ ID NO: 398405 - RNA, 61 nt, Homo sapiens
aaggcaacgugaguuguugauuuuuccuuuucuuggugaaauuuaacuggcucuguuccuu

SEQ ID NO: 398406 - RNA, 70 nt, Homo sapiens
ggggguguuggcuaccuggguguauguucaguuugugaaaauucacggagcgccuaagcuaugcacccuc

SEQ ID NO: 398407 - RNA, 59 nt, Homo sapiens
uugcaccccuacuauuugccaauuacuaugcaauaaaagauaaauaggacugggugcag

SEQ ID NO: 398408 - RNA, 84 nt, Homo sapiens
gugugagaggauacucuguugucuggccuuccugucugccuauggccaguccugcccaggcugacagaaucaucugccucacau

SEQ ID NO: 398409 - RNA, 60 nt, Homo sapiens
auaacguuuuuguuaauggcacaaaacaguucauuauugcuuuugacagaaacuuguugu

SEQ ID NO: 398410 - RNA, 61 nt, Homo sapiens
gcaacuaugugaggugaugacuacguuaauuagcuugacuauaguaaucacuucacaaugc

SEQ ID NO: 398411 - RNA, 55 nt, Homo sapiens
guguccauauguucucaucauuuagcucccacuuaaaagugagaacaugugauau

SEQ ID NO: 398412 - RNA, 68 nt, Homo sapiens
ggguacaugugcacaacaugcagguuuguuacauauguauaccugugccauguuggugugcugcaccc

SEQ ID NO: 398413 - RNA, 87 nt, Homo sapiens
uuuaucugccugucauuuuguuuucauuauccaugauagcaaucucuugcauggcuuaugagaacauaucaagugauugguuuuaaa

SEQ ID NO: 398414 - RNA, 76 nt, Homo sapiens
uggggaucuagagcggugcugggggauguuaacugguguucucugguuguaucucacaccccucucauauacccca

SEQ ID NO: 398415 - RNA, 66 nt, Homo sapiens
aaauugaaugugauggguuucaugugggucuuggauauauauguuauaccuaucucauuccaauuu

SEQ ID NO: 398416 - RNA, 62 nt, Homo sapiens
cagugcccagcacauagcaguugcucaguaauauuuuuauugaauaauucuuauugccacug

SEQ ID NO: 398417 - RNA, 107 nt, Homo sapiens
gggcuccucaaguguggccagaauggacgcugaggcugaggaggugcugagagugagcgagggcugcuagcacauugucaccucucauuuccacaugagauaggucu

SEQ ID NO: 398418 - RNA, 98 nt, Homo sapiens
cuggugacauuaaaucagucuuucaucuggcgaaugugaagagugccuaauauguaggaggcauuguucuagguccuaggauguaagagaugaaccag

SEQ ID NO: 398419 - RNA, 108 nt, Homo sapiens
gaucagccgcagcauuagauucucauaggagcacaaacccuacugugaacugugcaugcaaggcauuuagguuaugugcuccuuaugagaaucuaaugccugaugauc

SEQ ID NO: 398420 - RNA, 108 nt, Homo sapiens
cuuguaaaaauuauucaacauauacagaaauuuaaaaagcagcauugcagguuaugugagauuauguaugucugcucuuuggaacuagguugaaaugauagcuacaag

SEQ ID NO: 398421 - RNA, 58 nt, Homo sapiens
gacccugcugaucaggucuuaaaguccaaaacucaugagaugucugauugcgaggguc

SEQ ID NO: 398422 - RNA, 119 nt, Homo sapiens
guagcagaaagaggccaaacuuugauuaagggcucguuagauuccaucauuaaauuaucuacuaguauggaauuugugaccuuauaauuauaauuaaaguuccuucagaccauaacuac

SEQ ID NO: 398423 - RNA, 60 nt, Homo sapiens
aaguggaauguuuguggcacaaagaaaggauacauucuugaggugacagauacuucacuu

SEQ ID NO: 398424 - RNA, 76 nt, Homo sapiens
uuaugcuuauucaccagguagaagaaauaaauauaagaaacuauuuugucuugucuuguacuuugagugagcaugg

SEQ ID NO: 398425 - RNA, 99 nt, Homo sapiens
aucaaucacuucuucaagguaugaccaugauccuugccgaccaccuucccacagugggucaagagaggucaugguuuucuuuaauaggaaguuugugau

SEQ ID NO: 398426 - RNA, 69 nt, Homo sapiens
ugucugucuuuugcauauaagucauuuuaacuggggugagaugauaucuuauuguaauuuugauuggca

SEQ ID NO: 398427 - RNA, 69 nt, Homo sapiens
auaggucaucaugggagugggacugcugguuuuacaagaagcuagucccuuccccaugugauguccugu

SEQ ID NO: 398428 - RNA, 59 nt, Homo sapiens
gauugaggcuguuaaucauaaaggcccuguagcuagaaugaugagcaauaguuuuaauc

SEQ ID NO: 398429 - RNA, 56 nt, Homo sapiens
gugcauacucuggagacauugugccuuuccaaauggcguaaugagagugugaguac

SEQ ID NO: 398430 - RNA, 86 nt, Homo sapiens
ggaucuuauuuuugccaucaauuuaucuauguaacaagugguuuauuuauucauuggaugucugaaaugauuuaagaaugagauuc

SEQ ID NO: 398431 - RNA, 130 nt, Homo sapiens
aaauuacccagucucagguaguaucuuuacagcagugugaagauggacuaauauaguaaguacuuauuuaaaugguguauuagucuguuuucauacugcugauagagacauaccccagacugggcaauuu

SEQ ID NO: 398432 - RNA, 59 nt, Homo sapiens
ggugaucauugucucuaguaugaauuaaacucuucuugcuuaggucaccagugaucacc

SEQ ID NO: 398433 - RNA, 64 nt, Homo sapiens
guacaauagcaguuuucccuuuaucugccuaaggaaucuacaaguuggaagauuggcuaugugc

SEQ ID NO: 398434 - RNA, 61 nt, Homo sapiens
auguaaacauuuggucuaaauugugcaggucagauauaacguaggcuaaaugcuuuaucau

SEQ ID NO: 398435 - RNA, 71 nt, Homo sapiens
acaugaccagaaaacaaauuaguuuccauuuucccacauccucuggguacaacuugcauuuguggucaugu

SEQ ID NO: 398436 - RNA, 81 nt, Homo sapiens
ucugaaagauuggcuuuauacauaagaauaaggacuauauccaucaauuucuuuuucuuauggugaagcacaaaugucaga

SEQ ID NO: 398437 - RNA, 82 nt, Homo sapiens
gcccuaaugucccugaggcuagacuuugagaauuuuuuacaagagugaaaauuucaaaauaguuuagcaagugaccuaaggc

SEQ ID NO: 398438 - RNA, 124 nt, Homo sapiens
ucuagccugggauauguugcacaccuuagacauuaaugacuuuagguaggugcuuuuuucacagccagugcugucugugaaaguuauaaccuuucugacauuucugacacacguugcagcugga

SEQ ID NO: 398439 - RNA, 77 nt, Homo sapiens
ucgcuugaacccggaagguggagguugcaguaagccgagaucgggccauugcacuccagccugggugacaagaguga

SEQ ID NO: 398440 - RNA, 123 nt, Homo sapiens
agacuaacaaauccuugaaaucacacagcuugcaaauacguacuaaacugcacaagguguguguucuauaugugcaguuuuagcguauuuuaguugcauagguuuccaugguauuuauagucu

SEQ ID NO: 398441 - RNA, 69 nt, Homo sapiens
guaaagaucauucagggaaggcugagagucauucuaagguuuagccuuugcuuuggugauuaauuuuac

SEQ ID NO: 398442 - RNA, 64 nt, Homo sapiens
guuugguucaguuuaacgaguaauaucugcuggauguuagauacugcggaggugcugaucagau

SEQ ID NO: 398443 - RNA, 70 nt, Homo sapiens
auauccuugccaauacuugcuaucuuuuggcuuuuugguaauagcuauccuagcaggugucaggugauau

SEQ ID NO: 398444 - RNA, 102 nt, Homo sapiens
cccaaagugcagggauuacaggcgugagccucuguguuaaaaauacuuuggaguauauaggccaggcacgguggcucacgccuguaaucccagcacuuuggg

SEQ ID NO: 398445 - RNA, 64 nt, Homo sapiens
uauauuaugcauggucugaagucaaccucuaaagagagguugucuaauugagcguuguaguaug

SEQ ID NO: 398446 - RNA, 68 nt, Homo sapiens
ucgcuugaaccugggaggcagagguugcaguuagccaaaauugcaccacugcaccccagucuggguga

SEQ ID NO: 398447 - RNA, 78 nt, Homo sapiens
uuagauaaaugaggauaguguugaaggcaggaggggauucuccuguucugccccagccuugucgugcuucccaucuga

SEQ ID NO: 398448 - RNA, 63 nt, Homo sapiens
gcccaggagauggaggcugcagugacccaugaucacaccacuauacuguacuccagucugggc

SEQ ID NO: 398449 - RNA, 73 nt, Homo sapiens
gcgaccggccugacauccccaguuuuaaagcuaguucucuguagucuuauuaagcuaguugucagugcuuugu

SEQ ID NO: 398450 - RNA, 57 nt, Homo sapiens
guguccucgaguacacaucagggucucagccucggccacgugugucugugaguacac

SEQ ID NO: 398451 - RNA, 65 nt, Homo sapiens
agcacuucuucagccaacuucuaagaaugcacaaguagcuuccauggaauuaauggagagguguu

SEQ ID NO: 398452 - RNA, 56 nt, Homo sapiens
aggccuuuugaauuugcuuaaaacuauuaagaaguaauuaaguaguuagagggucu

SEQ ID NO: 398453 - RNA, 82 nt, Homo sapiens
gugggaaguuuagagaguuguuuuaaggcacugacuuuuaaaaguaggguuaguuguugagaauaacagaagagguuuuagu

SEQ ID NO: 398454 - RNA, 93 nt, Homo sapiens
uguaccaccauauuuguugcagcauuauucacaauugccaagauauaaaaaaccuaaauguuaguggaugcugaauaaagaaaagcugguaua

SEQ ID NO: 398455 - RNA, 121 nt, Homo sapiens
cugcauaaaauuacaacggcacccucuuuagaagagauuuugauuuauauaaugguagugacuuuuauguguuuaauguuucugaaacuaaaagaggagaugagccccugugagcaggcag

SEQ ID NO: 398456 - RNA, 56 nt, Homo sapiens
caccuguacauggcaguguccucugggcacagagaccuacugcagcuguggcagug

SEQ ID NO: 398457 - RNA, 93 nt, Homo sapiens
uuccuauugcuccuuuuguugcuauuuagcaccugugcacaccaggcauuagucggugcauugggagucagugcugaacaaaggggguaggag

SEQ ID NO: 398458 - RNA, 57 nt, Homo sapiens
aggugauaccuuccuauagucccagcuaccggggaggcugaggugggagaaucgcuu

SEQ ID NO: 398459 - RNA, 89 nt, Homo sapiens
guuggagguggggccuggugggaggugauugggucacuggggugguuucuaaugguuuugcaccaucccucuagugcuguucucacgac

SEQ ID NO: 398460 - RNA, 86 nt, Homo sapiens
ggccuccaucacugugccaagcuugcgaugugcuguguccauuauccagggcauauugagcaacuggguacaaaagaucacaggcu

SEQ ID NO: 398461 - RNA, 82 nt, Homo sapiens
ucucacuuggcuagcuaaauucagcucuagguaagguuaaauccuucucccaugaucuggauuuucaaguuucccagugaga

SEQ ID NO: 398462 - RNA, 96 nt, Homo sapiens
aggagaaucgcuugaacccaggaggcggagguugcagugagcugagguggcaccacugcacuccagccugagccuggaugacaaagugagacuccu

SEQ ID NO: 398463 - RNA, 58 nt, Homo sapiens
uuuaaagcuccaagcaugucuggcauauaguaugcaaccaguaagugcuaguuuuaaa

SEQ ID NO: 398464 - RNA, 76 nt, Homo sapiens
gagugugaaauguuaucccgucgugguuuugauuuguauuucccuagugacuaaugacguucagcauuuuucauuu

SEQ ID NO: 398465 - RNA, 126 nt, Homo sapiens
uguuacaguccccaacauuauucaguagaauacugaauauaguuaacaguauauuacaguacuacuggcuguacuauacuguaacuguauucaguauucugcugaauacuguaggcaauuauaaca

SEQ ID NO: 398466 - RNA, 80 nt, Homo sapiens
uuugcauuuuuaaucugugacaucucuuuuaccugaauuuaaaggaagaugguguuuucucaccagauuuguaaaguaaa

SEQ ID NO: 398467 - RNA, 59 nt, Homo sapiens
gcaucuucuaaugaguauaguagcugagagaagauagcuauuugcauucagaggcaugu

SEQ ID NO: 398468 - RNA, 63 nt, Homo sapiens
agcccccgugagcagguucugaucagcucauuuuacaguugaggacacugagcaugggagguu

SEQ ID NO: 398469 - RNA, 56 nt, Homo sapiens
guugguucuauuuauaugcuggauuauguuuauugauuugcauauguugaaccagc

SEQ ID NO: 398470 - RNA, 58 nt, Homo sapiens
cuauugcaacagaagaaagaguccggcaugaccuggacucaccuucaucugugcagag

SEQ ID NO: 398471 - RNA, 60 nt, Homo sapiens
uugagacggagucuugcucuguugcgcaggcuggagugcaauggcgugaucuccgcucaa

SEQ ID NO: 398472 - RNA, 77 nt, Homo sapiens
uuuuggaaagagguguuuaugacuuuuaguuggagugauguagaaacuguacaguuguaaacauauuuuuuucaaaa

SEQ ID NO: 398473 - RNA, 64 nt, Homo sapiens
uuccugguuucucuaauuguauuaugguucuguagcaugauaacauugggggaagcugagugaa

SEQ ID NO: 398474 - RNA, 129 nt, Homo sapiens
uguccugugagccucuaaagcagugguuuucauuccggagugauuuuaacuuccagcaauguccgaagacauuuuuagucgucaaagcauuccgggaagaggagcaugcuacugacaucuaguggguag

SEQ ID NO: 398475 - RNA, 62 nt, Homo sapiens
ccuauuagacacaacaacauauaaguacagauuaagauguuaagaugugcuguguuguuagg

SEQ ID NO: 398476 - RNA, 91 nt, Homo sapiens
cugguaguuaaagauugaccaggaccuaaucaguuauuugcauaagaaaagcacugugaagaucccuguccuguuccauucuaauuaccag

SEQ ID NO: 398477 - RNA, 113 nt, Homo sapiens
guaacguaaugacuaccauaugguaaggcuucuuggaauacugcaggguagacuuuuccugcaacauccaaugacgccucaucauuuuuggaauuuuucauuuuuuccauuac

SEQ ID NO: 398478 - RNA, 67 nt, Homo sapiens
cuacaucaccacugauugcuaaggagggacaaaugagagaggcuuuuuacaguugguugugaggugg

SEQ ID NO: 398479 - RNA, 127 nt, Homo sapiens
gggaugugaacauagguuuucaagccaauuagauaaauauguagaacaauugcuggauccgaauuuuauaagauauauguucagacuagcaauugucuuccaaaguggcuguaacauuuuacauucc

SEQ ID NO: 398480 - RNA, 83 nt, Homo sapiens
ucuccauuuguaaggguuucucccacugugcaccagaauaagaauggugacucuaaauuacuggagacucuuaucaauggaga

SEQ ID NO: 398481 - RNA, 59 nt, Homo sapiens
gcuuggagaacguuuucuagaaaaggguuagcuuccuguuggcaugaaauuuuccaagc

SEQ ID NO: 398482 - RNA, 72 nt, Homo sapiens
aggcuguugugaggugguagguucacagcagcccugacccccugggcucaagcuauccucccaccucagccu

SEQ ID NO: 398483 - RNA, 124 nt, Homo sapiens
gaucaugccacuucacuccacccuggacgacagagugacauuccaucucaaauaauaauaauaauaaauucauuagagacagggugucacucuguugcccaggcuggagugcaguggugcgauc

SEQ ID NO: 398484 - RNA, 68 nt, Homo sapiens
agggacuauauagauuagggucuguuucuggguucuauucaguuccauagaucuauuuauguaucccu

SEQ ID NO: 398485 - RNA, 58 nt, Homo sapiens
agggugggggcagcagagacaaugcccauucuaggcaccccuuugguccccgcacccu

SEQ ID NO: 398486 - RNA, 80 nt, Homo sapiens
cuauaaucccaguguucuggaaggcugaguuaggagaaucacuugaggccaggauuucaagaacacccugggcaacauag

SEQ ID NO: 398487 - RNA, 76 nt, Homo sapiens
uaucuuggugaauauuuuauguaagcuugagaagaauguguguucugcuguuguuugaugaaguaaucuauagaua

SEQ ID NO: 398488 - RNA, 113 nt, Homo sapiens
cugccuuuggggcuccaguccaugccucaggugucacauggcacugcgggcuucuugguugccaagaggcagaccacaggccaucuuggggaggacuuuauauucaagugcag

SEQ ID NO: 398489 - RNA, 108 nt, Homo sapiens
gacuuucucaggggucuuuuccuccagugguagaagaaccugccccucccgcaaaaggggugguuuuaucucuucccuuccccaggaaagguuuucugucucaagguc

SEQ ID NO: 398490 - RNA, 79 nt, Homo sapiens
cuguuuaaaucugccauucugaucuaaugaaucuacagucacuauuuagauuauuggcugauuugauccaccugugcag

SEQ ID NO: 398491 - RNA, 70 nt, Homo sapiens
agaaagaauacaagcaggaaaugguauauguaguagucuuauuuuucuuuccuaguuuguuuaaauuucu

SEQ ID NO: 398492 - RNA, 70 nt, Homo sapiens
cauagccaugcacaugcgaaaacuugugugcauuugcacacuugauuuccuuugcaugugcauggccaug

SEQ ID NO: 398493 - RNA, 118 nt, Homo sapiens
ucaaucuuuuggaauaguuucaguaagauuugcaacaaucguucuuugaauuucugguagaauuuagcuaugaauucaucugguuuugggauuuuuguuggcuuuuuuaaauuauuga

SEQ ID NO: 398494 - RNA, 58 nt, Homo sapiens
ucuguucuccuggcagguggggcugaagcugcccacccuacccuguauuagagaaaga

SEQ ID NO: 398495 - RNA, 73 nt, Homo sapiens
uggaugagaauccaggaacaggguuuagcauuggugagaguggcaagaugacucagucuuggauuuuuaauca

SEQ ID NO: 398496 - RNA, 58 nt, Homo sapiens
ccuagaagcauauucagaacagagguucauagaaaauuuguuagaaaguguuccuagg

SEQ ID NO: 398497 - RNA, 93 nt, Homo sapiens
cgcccgggcuccagcuuuggcucuggcugggcuccagcuccuucagcugcaccagcuccaccagggccuugguugugaagauggagacccgcg

SEQ ID NO: 398498 - RNA, 97 nt, Homo sapiens
caacgcuaaaauaccaaggauauuauugguugcaaauuaaucucucaguuaucacauaaugggcacugauguauucuguguguguuuuaaaacguug

SEQ ID NO: 398499 - RNA, 76 nt, Homo sapiens
uugcuggaaccugggaggcggaggcugcagugagccaagauugugccacugcacuccagccuggaccacagagcaa

SEQ ID NO: 398500 - RNA, 64 nt, Homo sapiens
auugugaauagugccacaauaaacacacgugugcaugugucuuuguaguagcaugauuuauaau

SEQ ID NO: 398501 - RNA, 63 nt, Homo sapiens
cuauguguccauauguucucaucauuuggcucccacuuacaagugagaacaugugguauuugg

SEQ ID NO: 398502 - RNA, 70 nt, Homo sapiens
cuggauguccaggcagaaguuugcugcaagggcagggcccucauggagaaccucugcuagggcaguucag

SEQ ID NO: 398503 - RNA, 100 nt, Homo sapiens
uaauacuggcauuguagaaugaguuuggaaauauuaccuccauuuuucagaauaguuugaguaggauugguauuucuucuuuuuuauauguuugguauua

SEQ ID NO: 398504 - RNA, 82 nt, Homo sapiens
ugggucaacugguauuucuaguucaagauccuugaggaaucgccacagucuuccacaaugguugaacuaguuuacaguccca

SEQ ID NO: 398505 - RNA, 58 nt, Homo sapiens
gggguaugacuauggauugugaggcucuuuaagagguuaaaggcuccaauuauacccc

SEQ ID NO: 398506 - RNA, 73 nt, Homo sapiens
ucaaaugauucagaagccaccugcagugaaaugacugucagaaaugcagcugguucugaaaacuuuauucuga

SEQ ID NO: 398507 - RNA, 99 nt, Homo sapiens
acugccaacucaguuaagaagaacacauagagaaguuuuaucagcagccucuguucccaauggaagucucuguuaaguuucucuggcugaggacuuagu

SEQ ID NO: 398508 - RNA, 65 nt, Homo sapiens
ucccuaucgacacugaccuaguucagcaccugaccccaucugcaccuaggucagguguccuggga

SEQ ID NO: 398509 - RNA, 58 nt, Homo sapiens
gguuggaggugggaauagcuaguuauccaugacccaauuuauagcucuauuucuagcc

SEQ ID NO: 398510 - RNA, 76 nt, Homo sapiens
ggucugcagcaaccucaauucuugcuuccucaggagaaaaaauucaacugaaggacauaaggcagagugagagacc

SEQ ID NO: 398511 - RNA, 60 nt, Homo sapiens
gaaucauugagagacugagcuauauaauacuuguauagagcugugucuucuuaaagauuu

SEQ ID NO: 398512 - RNA, 56 nt, Homo sapiens
ugggaucauucaaugacgaaaucgccuaaagacgcauuucucagaauguauuccca

SEQ ID NO: 398513 - RNA, 58 nt, Homo sapiens
uuaaagaugcugggaaggcuaggcaagguggcuuguaccuguaaucccagcacuuugg

SEQ ID NO: 398514 - RNA, 78 nt, Homo sapiens
ggccaggauuugcaauuuaaugugucccaauuaauucacuugaaaauuaguaacacucuguuuacguugccucuggcu

SEQ ID NO: 398515 - RNA, 63 nt, Homo sapiens
guaguuuauaguacuauugcaguguuauaauuaguguuaccacuguuacugguauuauacuau

SEQ ID NO: 398516 - RNA, 82 nt, Homo sapiens
gcuauuuuuuaucccuuuuuucauuaaagcaagguuguuuaugugcauuuuuguucaccucaaggaugggagagagaagagc

SEQ ID NO: 398517 - RNA, 56 nt, Homo sapiens
ugaaucaugcugcuauaaagacacacgcacacguauguuuauugcagcauuauuca

SEQ ID NO: 398518 - RNA, 75 nt, Homo sapiens
agcaguagugaaaguagacuuaucucucuuuuuccuaaucuuaaggauaagcauacagucuuucacuauuuuguu

SEQ ID NO: 398519 - RNA, 77 nt, Homo sapiens
augauggagaucacuguuuauauucucuguaaaguuuuaauuaugaaaaaagauuugugaagguggucuugaguugu

SEQ ID NO: 398520 - RNA, 62 nt, Homo sapiens
caauucaguagccacuauacacaugcagcuguuggguacuugauauguggcuauugagauug

SEQ ID NO: 398521 - RNA, 62 nt, Homo sapiens
ggguaggaggugggcuguccugugcauugcagaauguuuagcagcaucucuggcuucuaccu

SEQ ID NO: 398522 - RNA, 112 nt, Homo sapiens
ucuuggucgaaggcgaguuuccuggcaaagugugacgugggggucauuuguacuccuaacaugucuagacccucaugccauuuuuugaaagagcucgcagaagacgccagga

SEQ ID NO: 398523 - RNA, 61 nt, Homo sapiens
uuuuugcuuaaaguccuugugggagucaguagcauuccaugaaacagauuuuaaguaaaag

SEQ ID NO: 398524 - RNA, 81 nt, Homo sapiens
cuucaagucaaccuauacugucagcaccaggacccacuaaacuuacuguaggaaauuggucacugacauguuugaaagaag

SEQ ID NO: 398525 - RNA, 56 nt, Homo sapiens
gccccguuacagccucagugccugcccaaggaucaggcuugagaaaugagcguggc

SEQ ID NO: 398526 - RNA, 83 nt, Homo sapiens
guacagauguauuuugguuauccugucgguaauucaugcuagauaaucaugaacccagcaguuaaugaccucuacucugauac

SEQ ID NO: 398527 - RNA, 83 nt, Homo sapiens
gguaacaucuuuauagcagugugaggacagacuaacacaucaucuguauuaguccguuuucacacugcugauaaagacauacc

SEQ ID NO: 398528 - RNA, 76 nt, Homo sapiens
cuuacagucuaucagccacaacuugaaguaucuucucuccucuuugcugccaaauaaugucucugaagacuguaag

SEQ ID NO: 398529 - RNA, 60 nt, Homo sapiens
uacaauucucaggucuacuugaugcucugaacaagagugcuacaggacugagaaucugug

SEQ ID NO: 398530 - RNA, 61 nt, Homo sapiens
cuauauguccauguguucucaucauuuagcuccuauuuaagugagaacaugugguauuugg

SEQ ID NO: 398531 - RNA, 68 nt, Homo sapiens
gaaaaagugaccuaacaaugaaggccauucagaaugaugaaggcuuccaagcacuaguguucuuuuuc

SEQ ID NO: 398532 - RNA, 74 nt, Homo sapiens
gugugcgugcauacuguaugcgugcauaccgugugugugcguacugugugugugcguacugugugugugcguac

SEQ ID NO: 398533 - RNA, 64 nt, Homo sapiens
aaguagcucucagcagaugggggagccagaagggagauggcuuuccccuggaguggggcugcuu

SEQ ID NO: 398534 - RNA, 76 nt, Homo sapiens
guggcauugccuucugcaggaagcccuccccgagcugcaaaacccucuccgcucucacugcacuagguaaugccac

SEQ ID NO: 398535 - RNA, 69 nt, Homo sapiens
ggguggacuugucaugguuaauuuuauguaucuacuuuacuuggucauaaggugcccagauauuuacuc

SEQ ID NO: 398536 - RNA, 69 nt, Homo sapiens
auuuagcagcagugguguauuuagauacuuccccacuuguggaagucugauuagcuccauuugcuaagu

SEQ ID NO: 398537 - RNA, 65 nt, Homo sapiens
agacagggucuugaucagagcucacugcaauaucaaacuccuggguucaagugauccuccugucu

SEQ ID NO: 398538 - RNA, 77 nt, Homo sapiens
aaggugacaucagcuccagguauaaaaggauuacggcauagcaagaaaucagcuuagaucuggcaagauguuaccuu

SEQ ID NO: 398539 - RNA, 96 nt, Homo sapiens
gcacacacagauagugcaguuugagguucacagaugcuugacccauuucuacucacuaggauggacucaucuguucauguugcauaacuguugugc

SEQ ID NO: 398540 - RNA, 55 nt, Homo sapiens
ggggcucuagguaaagcaacauagcaacuacuaugugaugcagggccugggccuc

SEQ ID NO: 398541 - RNA, 68 nt, Homo sapiens
gaggauucugagcugucuuuguuaguuguccuaguuucuuuugacugauauucaacaaagaaaucuuc

SEQ ID NO: 398542 - RNA, 67 nt, Homo sapiens
ucugccuuagcagcaauuaucaaucucauuaaccuauagacauguuuguuggauaguuguuggcaga

SEQ ID NO: 398543 - RNA, 72 nt, Homo sapiens
ucaucaaauuuaaggcacuucaugguuucagagaaaacaaaaucugaaaaaaauguguuuuagaauuaauga

SEQ ID NO: 398544 - RNA, 105 nt, Homo sapiens
ucuugcacagcauuuaguacagugcuugguaucuaguaagcucucaauagacauugcuaccauugauaccagcacugccucuacuaauaauucugcuacaaaaga

SEQ ID NO: 398545 - RNA, 75 nt, Homo sapiens
acuuucccguggcucuggggcaugaacucucaguacugcugcuguagaugccucauguucuagguucuggaaggu

SEQ ID NO: 398546 - RNA, 126 nt, Homo sapiens
uuguugggaacuggaacacaguugacucuuguuauguuuuagcaaagagacugguggcauuuuaucccugcccuagagauuuguggaacuuugaacuuaagagaggugauuuaggguaucuagcag

SEQ ID NO: 398547 - RNA, 101 nt, Homo sapiens
acgguuucaugaagacagcacaucagguugugaaaggcacauugguuuuagaguuaaacaaaugugcacuuggagccuugcugugcuaacuuccugacugu

SEQ ID NO: 398548 - RNA, 90 nt, Homo sapiens
agauaccaacaacaaggcaguuuguucuugcuccuuuaagggagagcuucccagaaaaauaagaaguaagcugacaggucguugauauuu

SEQ ID NO: 398549 - RNA, 56 nt, Homo sapiens
uugagauggaguuucaauauugucacucaggcuggagugcaauggcucuaucucgg

SEQ ID NO: 398550 - RNA, 63 nt, Homo sapiens
caugguuucacagaugugcauauauaugucaagagucaucaaauuguacacuguaaaccugug

SEQ ID NO: 398551 - RNA, 82 nt, Homo sapiens
aguuuuaggguacaugugcacaacgugcagguuuguuacauauguauaaaugugccauguugaugugcugcacccauuaacu

SEQ ID NO: 398552 - RNA, 55 nt, Homo sapiens
gggggacuggccaugcucuaugaguuaguuuaauggaguguagaagccagccucc

SEQ ID NO: 398553 - RNA, 57 nt, Homo sapiens
uguaguucagaaguccaggugggcucaaauguguucucugguuaaggcugaacuaua

SEQ ID NO: 398554 - RNA, 79 nt, Homo sapiens
aggcuagagugcagcggcgugaucuugacucacuggaaccuccgccucccagguucaagcaauucugcugccucagccu

SEQ ID NO: 398555 - RNA, 62 nt, Homo sapiens
cucugugcagugugauccuuccguauccagaagauacgcagcugaacacaugcagauuagag

SEQ ID NO: 398556 - RNA, 127 nt, Homo sapiens
gaaaugaaacuuagcagauuguagcauauuaucuuuuugauauguaguuggacuugauuuucuugugucuuguugaggauuuuuccaucuauagucaucagugauauugaucuguaguauucauuuu

SEQ ID NO: 398557 - RNA, 68 nt, Homo sapiens
gggaaguugacagaugggggcauuuggaggaugaggaggaucucaggaugacccuggguguccuuucc

SEQ ID NO: 398558 - RNA, 100 nt, Homo sapiens
gaggugggagaaucucuugaacccuggaggcggagguugcggugagcugagauuccgccauugcacuccagccucggcaacaggagugaaacucccucuc

SEQ ID NO: 398559 - RNA, 57 nt, Homo sapiens
uuacuugagaugaguuggacaaauuuugaauucaaaagcugucuaacuguccaguga

SEQ ID NO: 398560 - RNA, 64 nt, Homo sapiens
uaauaucgaauuucauccugugguaaaauaaaauuaggcuaccacaggguaaaguuagauauua

SEQ ID NO: 398561 - RNA, 77 nt, Homo sapiens
uuuuccagccaaagagaaaguauuuggguuuugagcaucuuuuuaacugagaacauuccucuuccuggcuaugaaaa

SEQ ID NO: 398562 - RNA, 64 nt, Homo sapiens
uggggagugcuuuaugccuguggauucaggacacaccagcaaccuacacguguagcauucucua

SEQ ID NO: 398563 - RNA, 76 nt, Homo sapiens
aggaugagguagaauguuuuucagcugacaaaacauauuguuagcuggaaaacuaacauucuacuucauguggccu

SEQ ID NO: 398564 - RNA, 86 nt, Homo sapiens
ggccuuauaguauaguuugaagucaggaagugugaugucuucauauuuguucauuuugcuuagucuugcuuuagcuaugugggguc

SEQ ID NO: 398565 - RNA, 70 nt, Homo sapiens
aacaacuagggggguuauuuugaggccacccauuaggccuuagaagcacuaucccuccuagugcaauguu

SEQ ID NO: 398566 - RNA, 65 nt, Homo sapiens
ugggggaagugugugcauaggauggagcuauguuucuagaaccagcauggauacauuuucugcua

SEQ ID NO: 398567 - RNA, 69 nt, Homo sapiens
gaggcuucucgucaucagugucaggagcccaagcuacugggcagugagcacagcgugugggagagccuc

SEQ ID NO: 398568 - RNA, 75 nt, Homo sapiens
uggaguuaauuuuuuugcacauugugaaaaguacaggucuuaguucaccuucucagugugguaaaaguuuuucca

SEQ ID NO: 398569 - RNA, 59 nt, Homo sapiens
guucaucuugcugcauucuaccugggacuccaucagcuuggaacgcaaaugagaugaau

SEQ ID NO: 398570 - RNA, 98 nt, Homo sapiens
uuccagaggucaucccugugucuucuaacugcauuugucugucucaauugaucaguaaaaugagcaauuacagucggagcagcacugggauucuggag

SEQ ID NO: 398571 - RNA, 68 nt, Homo sapiens
cucaaacauuucucuugguugaacaguuuggaaacacuuuucuaagaaucugcgaagagauauuuggg

SEQ ID NO: 398572 - RNA, 127 nt, Homo sapiens
uauugaauuauuuuccagcuauauauaaaaagagaaaaggauauaugggugugugcaugcauauauauaucacauauauguaucugcacauacacuuauagcauauauagagaauaaaaguucaaua

SEQ ID NO: 398573 - RNA, 67 nt, Homo sapiens
auggaucugauaugugcuaaugcuuaauaacuaaucaucuagaguaaaguacucaguucaguuccgu

SEQ ID NO: 398574 - RNA, 57 nt, Homo sapiens
ugagaugaggucucgcucugucacccaggcuggagacaguggugugauuucggcuca

SEQ ID NO: 398575 - RNA, 58 nt, Homo sapiens
acccgggagauggagguugcagugagcugagaucgcaccauuacacuccaaccugggu

SEQ ID NO: 398576 - RNA, 90 nt, Homo sapiens
uugaauuuuauguauccauaagugcuuguugaauaauagcauuuauugaaugcugucaguaugcuuaagcacuuuuuauguguuauuuaa

SEQ ID NO: 398577 - RNA, 58 nt, Homo sapiens
uuuuacagaggagguugcugauuuuucucuucuggaauugauaacuuucacugugaga

SEQ ID NO: 398578 - RNA, 67 nt, Homo sapiens
aaccucauauguaugugcaauuuuguguauauggauacagaauuacacauguauguauggcgggguu

SEQ ID NO: 398579 - RNA, 65 nt, Homo sapiens
guucccgcuaugcuacuggauuuguauaaauacugauauucuccaaaccuagugguguagggagc

SEQ ID NO: 398580 - RNA, 57 nt, Homo sapiens
guauaaaagcaguucaguggaggaaagcuagccuuucagugacugcugcuuguauac

SEQ ID NO: 398581 - RNA, 89 nt, Homo sapiens
ggcugggucaaaugguauuucuaguucuagauccuugaggaaucaccacacugucuuccacaaugguugaacuaguuuacagacccacc

SEQ ID NO: 398582 - RNA, 74 nt, Homo sapiens
cuaucguaaugcacauauauuuccuuauucugccauaauaaguagaaucaacaggaugugcauuguaaagguag

SEQ ID NO: 398583 - RNA, 66 nt, Homo sapiens
cacacugugaacggacugaagcccacuuaacuguucacucuaaagugguucaguucguuacgugug

SEQ ID NO: 398584 - RNA, 61 nt, Homo sapiens
ugggaggaaggugcuaggccuugaguagcaggaagacaaugggucuggcuucuuuguucca

SEQ ID NO: 398585 - RNA, 125 nt, Homo sapiens
uggccaagauaucuaauaguuaagucugcaguguaauaguaggcauuuaccugacuuuugcuacuuuccagguagaaaguuugcugucacaugcaucuuuacugucaggaaauuaucccuagcca

SEQ ID NO: 398586 - RNA, 64 nt, Homo sapiens
acuucuugacucaaugaugagggaagaacaaaaucagucucuucaucagguaugucagcggagu

SEQ ID NO: 398587 - RNA, 71 nt, Homo sapiens
agcacugcaccauugcauacuuaauuaaaccguauuagauauuuuaauuaagcauacgauggugcagagcu

SEQ ID NO: 398588 - RNA, 72 nt, Homo sapiens
aaugcuugaauuuggggcuuugguauauuaauuuagauauuauguugaaauguguaagcuccgaaaagcauu

SEQ ID NO: 398589 - RNA, 76 nt, Homo sapiens
cugguaaauauuacaugcuuaacugacauuaacugcuagcagcugcaguagugguaguagcaguaauauuuaccag

SEQ ID NO: 398590 - RNA, 59 nt, Homo sapiens
uaguaaagaggucuggagccagauuggguucaaauucuggcuccacacuuuauuaacug

SEQ ID NO: 398591 - RNA, 70 nt, Homo sapiens
ucaagauauauaucaaagaaucaagauagugagguucacagcuucuugauagguuuuauguauaguuuga

SEQ ID NO: 398592 - RNA, 65 nt, Homo sapiens
agagcacagcaccaaggugcagaccagcauguccacagagccaucggccaccuggugcguguucu

SEQ ID NO: 398593 - RNA, 88 nt, Homo sapiens
uggaauauuucuaaaugggaccuggaaauuggaauuagaaguuuggaguuacuucuaaagccagugauuaugucucuuuagagaucca

SEQ ID NO: 398594 - RNA, 59 nt, Homo sapiens
uugcaucagcuccugauguacuggccucuaccucacuaugucauacucaguuggugcaa

SEQ ID NO: 398595 - RNA, 78 nt, Homo sapiens
uuaggauugcuuauuuguuaaccuggucuccuugcuacaguuuuugggagacauguuugccaauaauuuaaguucuaa

SEQ ID NO: 398596 - RNA, 58 nt, Homo sapiens
cuaagcaauguuucagaaagaguuaggacaguuucguccuauugaaugcauuacuugg

SEQ ID NO: 398597 - RNA, 61 nt, Homo sapiens
gggaagccaugcucagagguacaucucuaugcucuuucuaccucuaguaauaaaguuuccc

SEQ ID NO: 398598 - RNA, 64 nt, Homo sapiens
gggacagaauggaaagaggugguggucaccuuggccaucacuuugccuccgucucuaaccuccc

SEQ ID NO: 398599 - RNA, 67 nt, Homo sapiens
agauagaaguaggcuacgugucugguauagaguagugaaucagacacccugccugcaaguuccaucu

SEQ ID NO: 398600 - RNA, 59 nt, Homo sapiens
cagcucccagagugaccagcagagggcgcugggcccaacauggucaguucugggagcug

SEQ ID NO: 398601 - RNA, 62 nt, Homo sapiens
cagccuccaggaccagcugugauaguggccgaggcugaccauggcguguggcuuggaggcug

SEQ ID NO: 398602 - RNA, 58 nt, Homo sapiens
acucaagccuggggagguggagguucaguaagccaagaucaugccacugcacuugagu

SEQ ID NO: 398603 - RNA, 59 nt, Homo sapiens
uucuuuccauugcuuuuuggacuaaaauucucuaagcccagaauucucauuggaaggaa

SEQ ID NO: 398604 - RNA, 71 nt, Homo sapiens
uucaccagucagcuuguccagagacucugagcagaguagccagcagggucugcaggcaggcuugcugugaa

SEQ ID NO: 398605 - RNA, 69 nt, Homo sapiens
caucuggagaccaggguagagccacugauggaggacaggacagugguuuucaacccugguugcacggug

SEQ ID NO: 398606 - RNA, 74 nt, Homo sapiens
gacaagcuggcuuccuguguccgaauggggaagacaguuucuguuccuacuguucaucaggaaccagucagguc

SEQ ID NO: 398607 - RNA, 66 nt, Homo sapiens
cugcuccauggcuuuuccugucuugcaugugaccuucacaguauggcgaugaagggugaugagcag

SEQ ID NO: 398608 - RNA, 57 nt, Homo sapiens
ucugcuaagguguagacuggucacaagauaggcaacuucuccaauuacuccugcaga

SEQ ID NO: 398609 - RNA, 83 nt, Homo sapiens
augguuaagaagugguguuugggagcuggacagacauaacuuuggccagaguuugaauccuagcuauaccacuuacuagcuau

SEQ ID NO: 398610 - RNA, 76 nt, Homo sapiens
agaacugcaguaaacuuucccauucaaagagcagagaaauaggaggcagauugcaaugauaguuuauagcaguucu

SEQ ID NO: 398611 - RNA, 70 nt, Homo sapiens
gugccaucauuaauauuaggcauuauuuuucuuauucuugaaauacaguguuuuauauagugccuggcau

SEQ ID NO: 398612 - RNA, 78 nt, Homo sapiens
cuucugucaguuugucaaacucauucuccauccaguuuuguucccuugcuggggaagaguugugauccuuuggaggag

SEQ ID NO: 398613 - RNA, 100 nt, Homo sapiens
cacuggcuggaugccuucacaggcacugguucagaugccagagcacuggauucauccuuaggggggcucugagccagacugggugaggguggcccaggug

SEQ ID NO: 398614 - RNA, 80 nt, Homo sapiens
ggguacagaggagguggaauuccaggaauugagggagcaaaaccauggcacaguucaaggaauguuggcuucucuggcuc

SEQ ID NO: 398615 - RNA, 71 nt, Homo sapiens
ucacaggguggaagacauugggugaaggguacucaggaccuuucuguacuauguuuugcaacuuuuuguga

SEQ ID NO: 398616 - RNA, 58 nt, Homo sapiens
uucuuuugagcauuuauugugugcagagaauuuugccagaugcaguguucaacaagaa

SEQ ID NO: 398617 - RNA, 62 nt, Homo sapiens
cugaauguuucacucugaaaugggaguccuuggaggguuuugagcagaagagagacauucgg

SEQ ID NO: 398618 - RNA, 105 nt, Homo sapiens
ucagccuggugucuauaagacugguacuuugacuuuagacacagcgggggaugggcugcccccuccuuggucaaaaagaaagugucuaucugaugccaugacuga

SEQ ID NO: 398619 - RNA, 78 nt, Homo sapiens
guuggcacagaaguaauuguagucuuugccauuauuaauaaaaguaauggcaagaagagcaauuauuuuggcaccaac

SEQ ID NO: 398620 - RNA, 58 nt, Homo sapiens
uuuuccauuuacuugugcugucucuguacacagcuaggcauuguacaguaauggaaaa

SEQ ID NO: 398621 - RNA, 85 nt, Homo sapiens
ccauacgcuugcaugcauuuuuuauguuuuagguagugauauaaugcuugaauguaaauaauguacaggauaaaacaggcuaugg

SEQ ID NO: 398622 - RNA, 62 nt, Homo sapiens
uucuucugguuaugaaauuugauuaaaaaaugagauuugggaucaaagccauuaccagagaa

SEQ ID NO: 398623 - RNA, 73 nt, Homo sapiens
cagcuccuagaaguuuugugcucucuugcuaacucauacuuggucuuuagcagucuguuaaaacuuuuagcug

SEQ ID NO: 398624 - RNA, 85 nt, Homo sapiens
aucuacauuacaugugaguauuuaauacauuuuuaauaguauaaaaaguaaaaugaugagaugaugagauguucacaguguggau

SEQ ID NO: 398625 - RNA, 61 nt, Homo sapiens
gagaguucaaagggacuuaugaagauaacauuaagucuuuaagugcuuuucugaaacucuu

SEQ ID NO: 398626 - RNA, 124 nt, Homo sapiens
caucauaucuugucaccauguaaauccaaguucuucauuaaaaaugugcgugcugugccucaugcuacuucacauggcagcacaauuuucugauggagucuccuuauggugagugccugugaug

SEQ ID NO: 398627 - RNA, 130 nt, Homo sapiens
cuuaggagugacuuggcaaugcgggcccuuuuuuguuccauaugaacuuuaaaauaguuuuucccaauucugugaagaaagucauugguagcuugaugggguuggcauugaaucuauaaauuaccuuggg

SEQ ID NO: 398628 - RNA, 85 nt, Homo sapiens
acauuacugcacgugucuuuuggugaacaaauguagcauuuuuguugaauauguuucuaaaagugcaauugcuaauucaugaugu

SEQ ID NO: 398629 - RNA, 121 nt, Homo sapiens
acugcugcguuuucucuucugaacuucugucucugcuugucauggacaguuugcuaauugcuuuaugcggauuagucugcuuccugacuuagaaucaaagugugaguaagaauagaguagu

SEQ ID NO: 398630 - RNA, 63 nt, Homo sapiens
aggucucaaaguacuuugguuauugugguacaucagaaugauagcuaguauuuacugagaucu

SEQ ID NO: 398631 - RNA, 69 nt, Homo sapiens
ggggaauuucauuauucuuuccugacuaccuaacacaugucagaauuuggaaaguuaaggaaauacccc

SEQ ID NO: 398632 - RNA, 73 nt, Homo sapiens
uggcauauaggcacacaacccuggaccugaggacuggucuaccuggguccacauuuggugcccauguguguca

SEQ ID NO: 398633 - RNA, 70 nt, Homo sapiens
gcaggaaaggugggauauguucuuucacguugguggcauuucaccagugucaaaggacauacgccucugc

SEQ ID NO: 398634 - RNA, 59 nt, Homo sapiens
cuuuugagcaaauaaaucucaugagaauucacucaguaucaugagaucagcaucaaggg

SEQ ID NO: 398635 - RNA, 71 nt, Homo sapiens
gucaacucugguuagaaacagguccucaggaguauucucuaaccugauauuuucuaaaaagauauguugau

SEQ ID NO: 398636 - RNA, 85 nt, Homo sapiens
aucacuaccccuacaacuuugaaaucuuugaugguggcauuaauuucuguaauuuccccagaaagauuuuuagaggggaaguggu

SEQ ID NO: 398637 - RNA, 65 nt, Homo sapiens
cuccaggacacugauguaugcugugggcuggugcagcccagggcacagcagucaguuccauggag

SEQ ID NO: 398638 - RNA, 75 nt, Homo sapiens
gcaagacuguggagaaaauuaaagcaguuaaggggaauagaguguuagcugcguguagaguucucacuguuuugu

SEQ ID NO: 398639 - RNA, 55 nt, Homo sapiens
uguagucauuuggaguccagcucuuuuccugcugggcaccuauguaugauucaca

SEQ ID NO: 398640 - RNA, 97 nt, Homo sapiens
ugguggcaugccuguagucccagcugcuuaggagccugaggcaggaggacugccugagcccagcccuguaguucaaggcugcagugagcugugauca

SEQ ID NO: 398641 - RNA, 69 nt, Homo sapiens
acaauacugccuuuagcaaaacagugagaaauaaucuguaagcuuuacuauuugaacaggcaguguugu

SEQ ID NO: 398642 - RNA, 62 nt, Homo sapiens
auggugcugggaaaacuggcuagucauaugcagaaugaaacuggaccccuacuucucaccau

SEQ ID NO: 398643 - RNA, 74 nt, Homo sapiens
ccggagccaaagcugccuugcugaggagaaauccaaguggguuuccuccucccccaaggcauccagccucccgg

SEQ ID NO: 398644 - RNA, 57 nt, Homo sapiens
gauuagcacuucaguuacaguagcacaugcucaauauucaauuguggcuggcuaguc

SEQ ID NO: 398645 - RNA, 102 nt, Homo sapiens
gggguagagcugccugcaggggcagagagagggucagugacuugaugucuuuguccacugcuagccucugcacuuacuucauccuaaggccgguucuaccuc

SEQ ID NO: 398646 - RNA, 87 nt, Homo sapiens
cauuuaaaaaaucuuagcauuacaggcugaagaaaaucuugguauggugauuaucuuuagugacaguugugcaagaaaaauuaaaug

SEQ ID NO: 398647 - RNA, 82 nt, Homo sapiens
cugcguucaguacuuaaugugaugauucugaguugacuugagguaaucaggcauuagcacaguucauucauguuaaaugcag

SEQ ID NO: 398648 - RNA, 77 nt, Homo sapiens
aguagugucuaggggugggugucugugacuccugaagcccaagugggcauaucgcagugcacucuuuuagcuuugcu

SEQ ID NO: 398649 - RNA, 101 nt, Homo sapiens
ugaaugucuuuauuucuuuuucuuauaugauuaaacuugccagaaccaugagcacaaucuugaaucaaaguggcaaguuucaauccgagggaaaacauuca

SEQ ID NO: 398650 - RNA, 63 nt, Homo sapiens
gccuuuuuuauguugagauauauucuuuccauacuuuguugaguguuuuuaacaagaaagggu

SEQ ID NO: 398651 - RNA, 57 nt, Homo sapiens
uacauggguggugggaucuguaccucaaaccgcagcauugcacaauauacccaugua

SEQ ID NO: 398652 - RNA, 66 nt, Homo sapiens
uacuuuucuaaagagcuugugucagugucauuuaacaauaauuauuagcccaucuugaggaaagua

SEQ ID NO: 398653 - RNA, 80 nt, Homo sapiens
cucugcuagggcagugcagaagggaaaugugggguuggagccuccauacagagucccuacuggggcacugccuaguggag

SEQ ID NO: 398654 - RNA, 55 nt, Homo sapiens
uagugcaccgggcccuuugaagcccagggcgccauucaaaguaugcucugcacua

SEQ ID NO: 398655 - RNA, 70 nt, Homo sapiens
agaaugcuuuuacacuguuggugggaauucaguuagcugaaccauuauggaagacagugugguaauuucu

SEQ ID NO: 398656 - RNA, 57 nt, Homo sapiens
acaggugaggaucugagccucacaaggacuucccuaagaggcauugugcucaucugu

SEQ ID NO: 398657 - RNA, 68 nt, Homo sapiens
cccuggguggccgcgucggguucagcgcuuucugcacuuguggcugaucuguagcagccaccacaggg

SEQ ID NO: 398658 - RNA, 75 nt, Homo sapiens
gugcccacuugguaaagcacaauuucaccuucuuguaaaccacagggcagagugaaaugcuaugaaugugggcac

SEQ ID NO: 398659 - RNA, 69 nt, Homo sapiens
ucacauguucucauuuauuugugggagcuccaauaguggaucucauggagguagagaguaaagugguga

SEQ ID NO: 398660 - RNA, 87 nt, Homo sapiens
ggaacuuguugggaacuggagcaaaggugacucuuguuaugcuuuagcauaacaagcaguggcacuuugccccugcccuagagaucu

SEQ ID NO: 398661 - RNA, 56 nt, Homo sapiens
uauguagaauugauugcucacuugagauuuggagugagaaucaucauggcugcaua

SEQ ID NO: 398662 - RNA, 71 nt, Homo sapiens
cucaccggaggguuugaacuaacugcucuggauaacuggccaggugguguuggguuccagccccagguggg

SEQ ID NO: 398663 - RNA, 64 nt, Homo sapiens
auagauguagauuuacuuccugugacuuugcagauagaguacaggcaaguuagucaucauuuau

SEQ ID NO: 398664 - RNA, 114 nt, Homo sapiens
cuggaagacuucaggcaccagcagcucaguauuucucaagccuguugaaaccaccuuuauaaagauucugacagugagagaaaucugacauggcugacuccaucuugcuucuag

SEQ ID NO: 398665 - RNA, 64 nt, Homo sapiens
ugagaugaacuugauuguuuuaggacuaaauguuuuuauucaauugacaauuagagaucacuca

SEQ ID NO: 398666 - RNA, 66 nt, Homo sapiens
uuacagucuuaggcagugcuuuauagcgauaugacaauagacuaguacagcacugcuuuacuguag

SEQ ID NO: 398667 - RNA, 73 nt, Homo sapiens
aagccugaguccuuuggccauagcuaaaugauuucauucuuuucaaaucaucuagguugagccaaucaggcuu

SEQ ID NO: 398668 - RNA, 65 nt, Homo sapiens
uggaauaagauaguggaagugggauuaaaaaauggaauuuguuccccuuucucuauuuuagcuca

SEQ ID NO: 398669 - RNA, 97 nt, Homo sapiens
auacuauguugaauaggaguggugaaaguaggcauuuuugucuuguucuaguucuuaaaaaaaauggcuuucagcuuuuccccauucaguaugaugu

SEQ ID NO: 398670 - RNA, 61 nt, Homo sapiens
cugucagugggaguucaggcuugcuguccccagcuggaaaugcagguggucccgcuggcgg

SEQ ID NO: 398671 - RNA, 72 nt, Homo sapiens
aggaaugcuuuuacacuguuggugggaguguaaauuaguucaaccacuguggaagacaguguggcgauuccu

SEQ ID NO: 398672 - RNA, 91 nt, Homo sapiens
gcugagauggauucucucuguuguguguuucagucuacuaagagauuuuuaucagcacugaucauacagcuucaguuuucaugcacuuagc

SEQ ID NO: 398673 - RNA, 90 nt, Homo sapiens
aaaacagaacaaguuugcuuauuagccuuaggucauuucuacccaauacuguuaccauauggcuucuauaaggaagcuuacuucuguuuu

SEQ ID NO: 398674 - RNA, 98 nt, Homo sapiens
gaggcaggaaaaucgcuugaacccggaguuggagguugcagugagccaagaucaugccacugcacuccagcccgggugacagagcaaggcuccgucuc

SEQ ID NO: 398675 - RNA, 82 nt, Homo sapiens
gccauuuucacuucuucugugauucuucaguuacuucaggccaucuggauguauacgugcaggucacaggggauaugauggc

SEQ ID NO: 398676 - RNA, 77 nt, Homo sapiens
ccaaguugucauaagccuauuauuucuuuacauuacugaagugaaagacagcauuaauggcuaaaugccauacuugg

SEQ ID NO: 398677 - RNA, 95 nt, Homo sapiens
ucagaucaucaggcauuagacucucauaagaagcacgcaaccuggaucccuugcaugugcaugucuaugcgagucuaaugcuucaggugacguga

SEQ ID NO: 398678 - RNA, 129 nt, Homo sapiens
cccaagagcagcccccauaccuugccacgaucucuggcuggcgagacagcuccaucacugugaacgccaagugguuggcagaggucucgugaccugugggaagggaggacggugguugcuccacauggg

SEQ ID NO: 398679 - RNA, 55 nt, Homo sapiens
uguugaaauuauugaccugggagcagggugcuaguucuauggucagaauucaaua

SEQ ID NO: 398680 - RNA, 72 nt, Homo sapiens
cuggcugaggcgagucucaguauuaagagcugugcccucgcugcuaagagaaugagacuuagcgcucuccgg

SEQ ID NO: 398681 - RNA, 68 nt, Homo sapiens
gggcuuuguacuaauauaggcaaaaguugaugguaacaugaacuguaagguauaggugauaagagucu

SEQ ID NO: 398682 - RNA, 74 nt, Homo sapiens
ccucacucuugccuuucuuccuugcuguaacuucugucuugacauagauagcaggaaaggggucagaucugggg

SEQ ID NO: 398683 - RNA, 93 nt, Homo sapiens
cuuuaagaauguugaauauugacccccacucuauucuggcuuguagaguuucugccgagagauuuggaauggggacauaugaaaauucuaaag

SEQ ID NO: 398684 - RNA, 75 nt, Homo sapiens
cuugcucuuaaucacuaugccaugaaguacaacagaaucaauauguuggcuuaaaguuaugguggugggaguaag

SEQ ID NO: 398685 - RNA, 60 nt, Homo sapiens
ugguacugucccaguucugucaagcgguccgucaagucugugauagacaucacagugcca

SEQ ID NO: 398686 - RNA, 104 nt, Homo sapiens
ucuuuuagcccuucuuagaguaagaugcaccccuuaccgggcuggguuuucaccuuuugaaaucauguauaaaaggggugcacuagcuugccuaagcuaagaga

SEQ ID NO: 398687 - RNA, 61 nt, Homo sapiens
gcaggugagccuuccagguguggguccccuccugggcacucacugugagaguuuauccugu

SEQ ID NO: 398688 - RNA, 83 nt, Homo sapiens
guacucauuaaagcuagaauuguuccagcaaguucaaauuacauauuuguucaauguaaauaauuccuaggcuuuuugagugc

SEQ ID NO: 398689 - RNA, 58 nt, Homo sapiens
ugcaaugggaaaaucagaaggccugggggccccagaccuagauuuuacucagcuugca

SEQ ID NO: 398690 - RNA, 87 nt, Homo sapiens
uggauacagugcugcacauuuuuuugagacuauuuuauucauuuauuacaguggauagaacuaagugcuuagaacaguauugauuua

SEQ ID NO: 398691 - RNA, 55 nt, Homo sapiens
acccgggaggcagagcuugcaguaagccgagauugcaccacugcacugccugggu

SEQ ID NO: 398692 - RNA, 86 nt, Homo sapiens
gagaauugcuugaacccaggaggcagauguugcgguaagcugagaugucacuacuguacuccagccugggugacacggcaagacuc

SEQ ID NO: 398693 - RNA, 99 nt, Homo sapiens
gcaggguuacugcugccuagcuccagugggguuacugcugucugacugaggcaccggcguguccccacuugguguccacaggcagcucccagcaccugu

SEQ ID NO: 398694 - RNA, 88 nt, Homo sapiens
uauuuuuugaggaugucaacaaaauuauucuaaguccuuuguggauuggcaaaggaacuggaauauuuugaacaauuuuuaaaaagug

SEQ ID NO: 398695 - RNA, 88 nt, Homo sapiens
uguuagauucaaauguauggcaguuucacucugggauuccaccaaaaggaaucuguagggaacaacuguacagaacacagaacugaca

SEQ ID NO: 398696 - RNA, 74 nt, Homo sapiens
uagcuuuucuagauguaggcagguaaauuuaaguuccagucuacuugauagugccuuuuauaucucuaaugcug

SEQ ID NO: 398697 - RNA, 126 nt, Homo sapiens
gaugguauuuucucaugacuaccuccagcaaagacuuauggaaggcuugugauaccucagcuuggauuacaugucuauccaugaacaauuauuguggacaaggacauagauuuucugaguaccauc

SEQ ID NO: 398698 - RNA, 76 nt, Homo sapiens
uugcuugaacccaggagauggagguuguggugagccaagaucacgcuacugcacuccagccugggugaagaagcaa

SEQ ID NO: 398699 - RNA, 73 nt, Homo sapiens
aguguacauucacaugagcagaagagauacacuguauuuccuauacacuauaucucugcugcuuauugucacu

SEQ ID NO: 398700 - RNA, 57 nt, Homo sapiens
gugggguagcaggcuccuaucuacuucuucacagccacuaggaauugccuaccccac

SEQ ID NO: 398701 - RNA, 72 nt, Homo sapiens
gcugcauaggaucuguguggacacuucagucuucucucccacuugcuggccccuccccgggucuagugcagc

SEQ ID NO: 398702 - RNA, 93 nt, Homo sapiens
uuaggcggcgaacucuuauuguugccaugcuuucauuugaaccauggagaaauggcaaaucagaggcauggacaaaaucauagagcuacuuga

SEQ ID NO: 398703 - RNA, 55 nt, Homo sapiens
aggagagugggggaaacagaugagugguuuagucacauguuugcuacauuuuucu

SEQ ID NO: 398704 - RNA, 69 nt, Homo sapiens
uugggcucuggggagucacuaagugucauugcaaaguaguagcauuggggggcauccucgugugcccaa

SEQ ID NO: 398705 - RNA, 78 nt, Homo sapiens
cauuaauaguggcugcugaguucacaucuaaaugggaaaugugccacguggagugaaaacacacuaaucuauuguaug

SEQ ID NO: 398706 - RNA, 60 nt, Homo sapiens
cugacauaauaaaugccuguuguuuuaagccacugagugugggggcauuucguuaugcag

SEQ ID NO: 398707 - RNA, 98 nt, Homo sapiens
ucugccuucaaauuuuauuagguuggugcaaaguaauuguuguuuuugcaauuacuuuuaguggcaaaaacagcaauuauuuuugcaccaaucccaga

SEQ ID NO: 398708 - RNA, 64 nt, Homo sapiens
uuuuugauguuggggcuaacagaugaugaugagacaugguuuaacaauagcuucacauuaggaa

SEQ ID NO: 398709 - RNA, 87 nt, Homo sapiens
ggguguuaauggccggagcauugggguuuugcaguuuggcaauguuucauggcuaagaugcacacuucacugacccaugccccaccc

SEQ ID NO: 398710 - RNA, 55 nt, Homo sapiens
aagucauggagaagguggaggugaguccuggcaugggccagcuucuccgugacuu

SEQ ID NO: 398711 - RNA, 81 nt, Homo sapiens
gugcagcuagaauaaagccaggagacguaauuggaaagagcagacuuguugagucuucuggcuuucaucauucuccugugc

SEQ ID NO: 398712 - RNA, 128 nt, Homo sapiens
guagagaugggguuucaccauguuggucaggcuggucuugaacuccugaccucaggugaggagggcagaucacuugaggucagagguucgagaccagccugggcaacauggugaaacccugucucuac

SEQ ID NO: 398713 - RNA, 81 nt, Homo sapiens
cuuuaagucuccaugaggaagacaggugacauacauaagguucaguggcacuuuggcuguguuccucaaggagucucagag

SEQ ID NO: 398714 - RNA, 81 nt, Homo sapiens
auuuuauuuccugaagauaggacaugaugggugcugugagaugguauuuaaaguaccugucugcaaggaaaacuuuaaaau

SEQ ID NO: 398715 - RNA, 76 nt, Homo sapiens
agagcuuuaaaaauaggaaaauauuuaacaagauaauacuuauuuuuagucugugaaaucauuuccuguaagcucu

SEQ ID NO: 398716 - RNA, 64 nt, Homo sapiens
auugugaauagugcugcaauaaacauacgugugcaugugucuuuagagcagcaugauuuauaau

SEQ ID NO: 398717 - RNA, 76 nt, Homo sapiens
uugugaaagcucaggaaucaagauauucuuccuucgaaauacuuagauaugucuuaguuaccuugggcugccauaa

SEQ ID NO: 398718 - RNA, 120 nt, Homo sapiens
gaaccucaaucagcuuuuuaaaaauacagauuccugggucccgucucuaauaugcuaagugagaggcuauuuagguagaacccagaaaucugaauuuuugaaagcuccccuugaugguuu

SEQ ID NO: 398719 - RNA, 85 nt, Homo sapiens
guucaaugauacgauuucagauugcauaccgaaaguagcuuuuaagaaccuacuguuugucaauucugaucuaguaucaaagaau

SEQ ID NO: 398720 - RNA, 89 nt, Homo sapiens
uagcagugucuuuacuauucacuguggguccuuuggauaguuuaugcuaaccaggugacucauggugagccccuagauaguuuuugcua

SEQ ID NO: 398721 - RNA, 79 nt, Homo sapiens
ggagaaggauguccauuucaaaccucauuugcagcugcuuuuuagucuuagugguuuuggaauggaauucaucugcuuc

SEQ ID NO: 398722 - RNA, 62 nt, Homo sapiens
uauuuagaugauauccacuuuuuaaagacuagagugucuuugagugugauaucgauuggaua

SEQ ID NO: 398723 - RNA, 59 nt, Homo sapiens
ccagagaacugagugugcuggcggagucugccuucagcugcaguacagucaguucaugg

SEQ ID NO: 398724 - RNA, 62 nt, Homo sapiens
uugguacuucaugcucacagauaaucagauugacuauccaguuuauuuguaauggagaccag

SEQ ID NO: 398725 - RNA, 75 nt, Homo sapiens
ugguauuucuaguucuagauccuugaggaaucaccacacugucuuccacaaugguugaacuaguuuacaguacca

SEQ ID NO: 398726 - RNA, 61 nt, Homo sapiens
aaauucagggacucauaggcagaagggacuguggccuuaucugagaugagacuuugaauuu

SEQ ID NO: 398727 - RNA, 66 nt, Homo sapiens
ucaucacuucuacucaacauuguacuggagguccuaaccagugcaauaaggauguagaacugauga

SEQ ID NO: 398728 - RNA, 84 nt, Homo sapiens
gcagccguagaguagcagaaagagcagugaagcugguauuagaaugccuggauuacaguguuuguucuguuacuuagcagcugu

SEQ ID NO: 398729 - RNA, 64 nt, Homo sapiens
uucaguuugccaguauuuuauugaggauuuucacaucaauguucauucgggauauuggccugaa

SEQ ID NO: 398730 - RNA, 59 nt, Homo sapiens
uuuuccagugggacucccauuaucacuauguugauauucuugauggugucccaugaaaa

SEQ ID NO: 398731 - RNA, 63 nt, Homo sapiens
cuugcucuaguagcggggcugugaaagaggagacaguaauguuugguccuccuacagggcagg

SEQ ID NO: 398732 - RNA, 70 nt, Homo sapiens
acuuggcuccuauaggaaacauacgugacuaggccaggggcuggcaaauguuuucuguaaagggccaggu

SEQ ID NO: 398733 - RNA, 60 nt, Homo sapiens
uagaauuauauccuguuguccuaugacuucuaagccaagggcacuauagauguuauucua

SEQ ID NO: 398734 - RNA, 129 nt, Homo sapiens
uauucuguuccauuggucuacguaucuguuuuuaugacaguacucugcucuuuugauucuauagcucuguaguauaauuugaagucagguacugugauuccuccaguuuuguucuuuuugcucaggaua

SEQ ID NO: 398735 - RNA, 60 nt, Homo sapiens
auuauuaguuguugaaugaaguggccuauugaugucaauuuuauucaguugauugauggu

SEQ ID NO: 398736 - RNA, 56 nt, Homo sapiens
uaggagcacagcagcauguggguccuucacucaucuacacccugaaaauguucuug

SEQ ID NO: 398737 - RNA, 64 nt, Homo sapiens
gcugugucauugcacuuggaaagcaaucauuuaaagauaguuuucaggcaggugaaagaccagc

SEQ ID NO: 398738 - RNA, 56 nt, Homo sapiens
uuauaauccaaacuuacugggcguugucuacaaauuguccagcuuuuggaauauaa

SEQ ID NO: 398739 - RNA, 75 nt, Homo sapiens
gucagucaggcuucagguacugggggaguauggccagcagcccccagccaagcucuaguccugagguaggcuggc

SEQ ID NO: 398740 - RNA, 69 nt, Homo sapiens
cacaaaauuagccgggugugguggaacuccugaggucaggaguuccagaccagacuggccaacauggug

SEQ ID NO: 398741 - RNA, 77 nt, Homo sapiens
uuuuguuuuauagguccugugagauguaugcauuaaagagguucuguuuugauguguuuccaggauuuguuucaaga

SEQ ID NO: 398742 - RNA, 66 nt, Homo sapiens
cucaguguuuuauccuccagagcccacucuagaauccucgcaggggcucuaagaggaaggccugag

SEQ ID NO: 398743 - RNA, 77 nt, Homo sapiens
gaagcuuggcaguggugugugccagccuagguuccagcucccugacccugagcuggcugccacaauugcuggguuuu

SEQ ID NO: 398744 - RNA, 79 nt, Homo sapiens
guugaaucucuuguguuacauauuuaagagaaggagaaaagaaagcuucuuuugaaagccugugaccaaaagaaagaac

SEQ ID NO: 398745 - RNA, 122 nt, Homo sapiens
auaaagguuaagaauagccugugaguuagcaaaacucccaaagguuuaugaagaaaguuacauuucaauaccuacaggaaguauuugcaugugucuaaggcuggauuguugaaggccuuugu

SEQ ID NO: 398746 - RNA, 59 nt, Homo sapiens
auccaaucauuaaugucacuguuuaagggaaaaccuuggaaggcuccuaaugaauggau

SEQ ID NO: 398747 - RNA, 65 nt, Homo sapiens
augagauuugggaggggucagagguggaauaauaugguuuggcuuuguccccacccaaaucucau

SEQ ID NO: 398748 - RNA, 95 nt, Homo sapiens
agaagccucuuuuucauguccagggacagcgggacucugacagcugagagcuggugggcggcugucucaguucccuucucuggacaagagcuucu

SEQ ID NO: 398749 - RNA, 77 nt, Homo sapiens
ucacuugaacccgggaggaggaaguugcagugagccaagaucgcgccauugcacuccagccugggcaacaagaguga

SEQ ID NO: 398750 - RNA, 100 nt, Homo sapiens
guccgcccccugcagccucacugaacacaccugcagcacguguguccgcaucaugauguccacagggguguucaggagguugugucagguucugcuggac

SEQ ID NO: 398751 - RNA, 82 nt, Homo sapiens
ccaggaugcugaaguggguuuucucuggaagccaggcccaugacagcuuugcacucugaagaccuacugucagccuucuugg

SEQ ID NO: 398752 - RNA, 63 nt, Homo sapiens
ggauacugugauuuuuuccuauuccauagauugagaaucuaggcuguagagaaguucaguacc

SEQ ID NO: 398753 - RNA, 63 nt, Homo sapiens
gaagaggaaguggcauugcaguugagacugagucuguuugccucugcacauccacucuacuuc

SEQ ID NO: 398754 - RNA, 58 nt, Homo sapiens
uuaggcuuauauucccaucagaacaucugguacaacugguggaagauaaguagccuga

SEQ ID NO: 398755 - RNA, 74 nt, Homo sapiens
ccuuauuuccaggaagauguguauuugcaaauguuuacuucuauuuggaacacauguuuuucuacccccagagg

SEQ ID NO: 398756 - RNA, 79 nt, Homo sapiens
ccucuuggggauucugaugcaugcucagguuugagagccacuguucuggugacugagauggguucugguccccugacgg

SEQ ID NO: 398757 - RNA, 65 nt, Homo sapiens
uucuuaaugcaucuagaaaggugaauuuuucccagaaguuuacuuugcccagauccaucagagaa

SEQ ID NO: 398758 - RNA, 93 nt, Homo sapiens
ggaauccccuuuguagguuucauaguuuauacugauauuucugaugucgucucagagaauuagucacaauuauaggaacucagaaggcauucc

SEQ ID NO: 398759 - RNA, 79 nt, Homo sapiens
gaauauaaacaguaggcuaaagcuauaucuuacccucaaaucugggugaaaugaucaguuugguuacugcuuuauauuu

SEQ ID NO: 398760 - RNA, 68 nt, Homo sapiens
uugcuugaacuggggaggcggagguugcacugagccaagauugcaccacugcacuccagcuugggcaa

SEQ ID NO: 398761 - RNA, 62 nt, Homo sapiens
gcagaggcaguugaaugaugcguuugguggguggcagcaaaugcauaucaagauugcccugu

SEQ ID NO: 398762 - RNA, 65 nt, Homo sapiens
uuuaugguuuauuagcaggguuauuggucaagauuaaaagcauguagcuagcuagaaaccaugaa

SEQ ID NO: 398763 - RNA, 69 nt, Homo sapiens
ucuccacacuuuuacaaacauuuguuaucacuugccuuuuugauaauagcuguccuuagaagugugagg

SEQ ID NO: 398764 - RNA, 90 nt, Homo sapiens
ugcuaugaaacagcaucaagugcuacagagaaaucuuucacgaaagaaagaggcaaucaauguagcaaacuucauuguugucuuauugua

SEQ ID NO: 398765 - RNA, 58 nt, Homo sapiens
uucauuucuugauucccuaucugaggucucuccaguucuuagagguuuaagaaaagaa

SEQ ID NO: 398766 - RNA, 92 nt, Homo sapiens
gugguguauuuaauuuggaccaguuuauucauuuuaaguuguuguugaacaaacacacaaaguaggcagugggcuggaaauggggacauugc

SEQ ID NO: 398767 - RNA, 68 nt, Homo sapiens
gauaaaugcuugaguggaugguaucccauucuccauaaugugauuauuaugcacugcaugccuguauc

SEQ ID NO: 398768 - RNA, 117 nt, Homo sapiens
uagggaaaucaccaugcguggaaaucucugugugacuuauaacauggaagaucucauuccaacgcauucuaucagguguaagccacauaaauuucuacuuuuuguugaacuuuccug

SEQ ID NO: 398769 - RNA, 58 nt, Homo sapiens
cugcagguucaaggcaaaggaagaugauugacuucuuaauucuuuggcugaacuguag

SEQ ID NO: 398770 - RNA, 60 nt, Homo sapiens
aguuaacccuuaguaucuguggguuccacgugcggagccugcagauauggagggcuaacu

SEQ ID NO: 398771 - RNA, 76 nt, Homo sapiens
ucacuugaaccugagaggcagggguugcagugagcuaacacugggccacuguacuccagccugggugacagaguga

SEQ ID NO: 398772 - RNA, 56 nt, Homo sapiens
acgggcauuugggcgauuccuaacaugugcuguaacaaauaaugccagaugucugu

SEQ ID NO: 398773 - RNA, 129 nt, Homo sapiens
uuguauuuucauccucuuaguagaguugcuuccagagauaaagauuuuaauuuugaugaaguccaaauuguuaauucauuaauuuaaauuuauuguguuuugguguugaaucuaagaauuauuugacag

SEQ ID NO: 398774 - RNA, 79 nt, Homo sapiens
ugugaguugggucuugggaggguguaauagggauggggacucuuccuaucccuguggacuucccaacagcccuugcaca

SEQ ID NO: 398775 - RNA, 99 nt, Homo sapiens
cuaugcugugcuggacuucugaucuacagaacugugaacuaaaaaagucgauguuguuuuaaagcacggaguuuguggcaguuuuuuacauagcaauag

SEQ ID NO: 398776 - RNA, 55 nt, Homo sapiens
ugggaucuuuccuauuagcgagagccaaguccuggcuaauacuaggaagauuuua

SEQ ID NO: 398777 - RNA, 100 nt, Homo sapiens
cucugccugucucccaggcuggaguguaguggcgcgaucucgggucgcugcaagcucugccucccagguucgcgccauucuccugccucagccaccagag

SEQ ID NO: 398778 - RNA, 80 nt, Homo sapiens
cuacuggacgucucccuaccugagccgagccaugcgggaugccggguggcugcuggggcagggaggacaggugcaggugg

SEQ ID NO: 398779 - RNA, 64 nt, Homo sapiens
guugugaauagugcugcaauaaacauaugugugcaugugucuuuauaguagcaugauuuauaau

SEQ ID NO: 398780 - RNA, 89 nt, Homo sapiens
cugaaacagcacucaagugugauagaauaucuuuccuuuaaaacugugcucugaaaugaagauguugcuuaccuuggagucucaaucag

SEQ ID NO: 398781 - RNA, 82 nt, Homo sapiens
cacaaccuuugaauaaccauguaaaaucuggugaaaguuuaccauaaccagacauucacaauuaaaugugguuauuuuugug

SEQ ID NO: 398782 - RNA, 88 nt, Homo sapiens
ggagaaucgcuugaaccugggaggcugagguugcagugagcggagauugugccauuguacuuaagccugggugaaaaggugaaacucc

SEQ ID NO: 398783 - RNA, 59 nt, Homo sapiens
uaugugcauaugaagcacagacaugcaugugugugugugucuguguguguguguccgug

SEQ ID NO: 398784 - RNA, 55 nt, Homo sapiens
uugagauggaguucauuuuuguugcucaugcuguaauacaauggugcuaucucag

SEQ ID NO: 398785 - RNA, 85 nt, Homo sapiens
agucuuauuauuucuuucauauuuuauaacuguuucugagaccuuuuguuagauaagagaucaauaugaaggaaaugugggugcu

SEQ ID NO: 398786 - RNA, 55 nt, Homo sapiens
cagcugaaugaaagguaguuuccucaugaugacuacaacuucuauuauucagcug

SEQ ID NO: 398787 - RNA, 99 nt, Homo sapiens
ugagacagucucacuguguugccuaggcuggagugcaguggugugauuucggcucacugcaaccuccgccucccagguucaagugauucuccugucuca

SEQ ID NO: 398788 - RNA, 73 nt, Homo sapiens
ggcugcaaauggcaguuuggucucugugcugugaagaaucaauggaaagggcccagcugccaugagagaagcc

SEQ ID NO: 398789 - RNA, 55 nt, Homo sapiens
uggcgcaaggccugugacacuguauugucagcagcugucauuaagcacugugcca

SEQ ID NO: 398790 - RNA, 67 nt, Homo sapiens
uuuucugacuaguuuuaaugcagauuuacuaaaagucaaaucuggcacugugaaauuuguuagaaag

SEQ ID NO: 398791 - RNA, 60 nt, Homo sapiens
ggauuuuaauguccaaaagaaaaggauuugauaaacccuaauauuuuggauuagaaaucc

SEQ ID NO: 398792 - RNA, 89 nt, Homo sapiens
gcgggaacaucaggauggauggacagacacuggccuucuggaagguucaacuccagcagggaagcugugcuguuucacaaauuggcugc

SEQ ID NO: 398793 - RNA, 67 nt, Homo sapiens
gcuuccuuguuuauuuacaggaggaaaagagaacuggcuucucuuguucugaagaaagcaaggaagc

SEQ ID NO: 398794 - RNA, 61 nt, Homo sapiens
gcuuuggugucucuucaggaacauuuuaucauuauaauguaauguucuggaggacagaagc

SEQ ID NO: 398795 - RNA, 61 nt, Homo sapiens
uauaugcacucagguguaugugagcgcuccuguuugugccuguguguaccgaguguguaua

SEQ ID NO: 398796 - RNA, 78 nt, Homo sapiens
ucuuugucacuggaggagaggaaguggagacugaaugacuuuacucaugaauucacauuuuuguccaguuugcaaaga

SEQ ID NO: 398797 - RNA, 102 nt, Homo sapiens
cuggauauuuucauuuagauagauaaaugcaaagcaaauaucugauauuugcaaggcgauuuuugcauuaucagauguuugcuuugcaaauauucuucccag

SEQ ID NO: 398798 - RNA, 74 nt, Homo sapiens
cuuuuuagagaagacguuugucucugguccacagggcuguggacagagacuaaauguuguuugucucuagaaag

SEQ ID NO: 398799 - RNA, 102 nt, Homo sapiens
aauauccacuguaagcucugucugaacugagacuagacuuguuccuucauggguggaggaacaaguuuagacucaguugagacauagcuuacaguggauauu

SEQ ID NO: 398800 - RNA, 65 nt, Homo sapiens
cucacaaguuaguauugguuuugggaaguugcuuugcuuuugauguugauacuaccuucagugag

SEQ ID NO: 398801 - RNA, 74 nt, Homo sapiens
agggaacacuuucacacuguuggugggaauguaaacuaguacagccacuguggaaaacaguguggagauuccuu

SEQ ID NO: 398802 - RNA, 62 nt, Homo sapiens
agcugggucuagggagcaggaggacagggacgagcugguccuugagccucccagacucaguu

SEQ ID NO: 398803 - RNA, 60 nt, Homo sapiens
ugugaauagugcugcaauaaacauacgugugcaugugucuuuacagcagcaugauuuaua

SEQ ID NO: 398804 - RNA, 72 nt, Homo sapiens
caguuugaguuugaggugcugaugaagcaugcaggugaggcugcguucagggccacugcgaauucagggcug

SEQ ID NO: 398805 - RNA, 60 nt, Homo sapiens
uucacguucugccaugauuguaaguuuccugaggccuccccagucaugaagaacugugag

SEQ ID NO: 398806 - RNA, 112 nt, Homo sapiens
caguaucacauaggaguguacacccucugcgauauuggaaguaauaucauccucuccccuccuggacaguaagaacaauaucacaguuggguguacaccuccuaugauauug

SEQ ID NO: 398807 - RNA, 88 nt, Homo sapiens
gguuaacaucuucaucugguuugugaacuuuuuacugcuuaggaaaucuuaagauacaaagggcauaugaucagggggauguauagcc

SEQ ID NO: 398808 - RNA, 115 nt, Homo sapiens
gcuugcuuuguuaaaugugugaaaugagaaaguggacuaagugaauaugaauagaauuggauauauuuauacauuugcuuuauuugaaaguuuaacuaugcuuaauauugcaggu

SEQ ID NO: 398809 - RNA, 71 nt, Homo sapiens
gaucaguaggugauccauuuguauuuuauuuuauuuagagauggggucacacucuaucacccagacugauc

SEQ ID NO: 398810 - RNA, 55 nt, Homo sapiens
gggaggagguucagacccaagguggcggcugcggcugguguuagcacuucuuccc

SEQ ID NO: 398811 - RNA, 79 nt, Homo sapiens
cuccaaugaugccuccaaugauuggagaugaauuucguuuuuuuugagacugagucugucucugucacccaggcuggag

SEQ ID NO: 398812 - RNA, 58 nt, Homo sapiens
cccaggaggcagagcuugcagugagcugagauccugccacugcacuccagucucuggg

SEQ ID NO: 398813 - RNA, 82 nt, Homo sapiens
gugauauaauagcuuaugcuuggaagagaugaucuuuuuaagaacaccagaucacuuaagcauuaaagcucaagaauauuau

SEQ ID NO: 398814 - RNA, 93 nt, Homo sapiens
ugguaauuuauagggcuauaugcagggcaguuuggguugauagcuuaguggaguuaucacccuuucauuguucuucaggucaucaaauuauua

SEQ ID NO: 398815 - RNA, 129 nt, Homo sapiens
ugaugugacugcuuucuacugccuuggcccugcacuuauagugcauugugacacauaacuggauacugcacccaggugaugugacucugcauuuuggguucugccaacagaaagcuuuguaacauauca

SEQ ID NO: 398816 - RNA, 74 nt, Homo sapiens
gcuugagcccaggaguuagcgaggcuguagugagcuaugauuacacuacugcacuccacccugggugacaaagc

SEQ ID NO: 398817 - RNA, 64 nt, Homo sapiens
uucaguuugccaguauuuuauugaggauuuucacaucgauguucaucagggauauuggccugaa

SEQ ID NO: 398818 - RNA, 64 nt, Homo sapiens
uucaguuugccaguauuuuacugaggauuuucacauugauguucaucagggauauuggccugaa

SEQ ID NO: 398819 - RNA, 73 nt, Homo sapiens
aucugucugguuggagaaucacugcaagccaaggcauggcauuggccaauggugauucccggccuccucaggu

SEQ ID NO: 398820 - RNA, 84 nt, Homo sapiens
cccugaaguaggaucaugagucccugagaccugugacugugcccugugccucaugugccacaguguuaagggauucuuuuuggg

SEQ ID NO: 398821 - RNA, 58 nt, Homo sapiens
ucuccacuuaauucagaugcugggaaaauauuuccuuggcagaugggugagcuggaga

SEQ ID NO: 398822 - RNA, 66 nt, Homo sapiens
uuggccuugugacacagcugggccuauaguggagguuacacugugccaguuuugucuaagccccga

SEQ ID NO: 398823 - RNA, 61 nt, Homo sapiens
uuaaggugaaguucucagaugcuggccaaccuaugaguuuugucuuagaauuucacuuuga

SEQ ID NO: 398824 - RNA, 82 nt, Homo sapiens
guucccuggaaaguggguuguuguaaagccaggacacuccuuguguuuuaucucuuugcacaucucugcuuucccuuugaac

SEQ ID NO: 398825 - RNA, 64 nt, Homo sapiens
cuugccuauugucaaaaaauagaauuuucuaagguuuauucuauguuuuugcuaguaguguaag

SEQ ID NO: 398826 - RNA, 82 nt, Homo sapiens
gcucaggccuguaauuuuagaauuuugggaggguuaggcaggaggauugcuugagcacaggaguuuugagaccagccugggc

SEQ ID NO: 398827 - RNA, 95 nt, Homo sapiens
cccuacuauuuucuugggaaacauccagcacauacucaaggugggagggcaguaagcuugaugguggcuagauguuucugaagacaagaguaggg

SEQ ID NO: 398828 - RNA, 82 nt, Homo sapiens
aguucuaggguacaugugcacaacaugcagguuuguuacauagguauacaugcuccauguuggugugcugcacccauuaacu

SEQ ID NO: 398829 - RNA, 71 nt, Homo sapiens
gcagagaccucaacuugucacgucucaagcucagauguacaaacuuugggaucgucaagugaggcucgugu

SEQ ID NO: 398830 - RNA, 56 nt, Homo sapiens
agagaguguaggcugggggugggagaauagcacccgucuuacagccagaugccucu

SEQ ID NO: 398831 - RNA, 61 nt, Homo sapiens
uaugagauuauuuaaaaggugauuuuccuaacaagggaaaauuugaaaccuauaauccgua

SEQ ID NO: 398832 - RNA, 63 nt, Homo sapiens
gcauuuauguugauuccaugucuuugcuauugugaauagugcugugauuaacauaauguaugc

SEQ ID NO: 398833 - RNA, 74 nt, Homo sapiens
uagccacugguccucuuggauuguuucucuugguaugaaacuuuucauccuaaaagcaauuuggauucgggcug

SEQ ID NO: 398834 - RNA, 74 nt, Homo sapiens
caguguuagcacagagcuuuuaaacuuccgcacugcugaugagggagugugauuguucucuguuaccagcacug

SEQ ID NO: 398835 - RNA, 66 nt, Homo sapiens
uuagcauaagggcaagcucuuuaguguccuucaaagcacauauguaaauagcugccuguguacuaa

SEQ ID NO: 398836 - RNA, 63 nt, Homo sapiens
uggccagacaagacuuggagcucuuucauuauucaggaaaugagaaugauucuguuaugguca

SEQ ID NO: 398837 - RNA, 55 nt, Homo sapiens
gcauaaucagaguuaguucaguguuaauuauuuugagagaugaacucugauaugu

SEQ ID NO: 398838 - RNA, 70 nt, Homo sapiens
uagucauuuuuggauauagggaaggauucuuccuugaaugaaccuugccucuuauucaaucaaaagacug

SEQ ID NO: 398839 - RNA, 79 nt, Homo sapiens
uuuuuccauagauagauagguagcaucauugauuugaaauaaauuaaauugcauugagcugcuuauuaauccagagaaa

SEQ ID NO: 398840 - RNA, 58 nt, Homo sapiens
uccugugagauaauguguaccaggucaaauuuaauuuuggucaguuuucucacuagga

SEQ ID NO: 398841 - RNA, 73 nt, Homo sapiens
uuacuagaaucuagaauccagaaauacaguacuguguccuugaggaauacaguguucugggaagaaguaguaa

SEQ ID NO: 398842 - RNA, 89 nt, Homo sapiens
ggagucucgcucuuguuaccgaggcuggagggcaguggcacgaugucagcucacugcauucuccaccucccagguucaagugauucucc

SEQ ID NO: 398843 - RNA, 67 nt, Homo sapiens
cacuagcugugccuggggugaguuagcugggacccuuuucaccaagcaccaccccaggucacaagug

SEQ ID NO: 398844 - RNA, 59 nt, Homo sapiens
uccuguaaaacgugauguguucguacguucuagauacacuguacuuauguuuugcaggg

SEQ ID NO: 398845 - RNA, 75 nt, Homo sapiens
gagggccaccugagguguuaacuuuacuuuuaggaguauuucuuagaagaggauauauuucauauuuuggcucuc

SEQ ID NO: 398846 - RNA, 62 nt, Homo sapiens
caguggagaguugaggaagaugcaugggaauuggucaggaacucccucaaacuuuuccacug

SEQ ID NO: 398847 - RNA, 65 nt, Homo sapiens
ucuuuaaacaaguaauaauguuguacuuucuucaucuauacaucuuguauugcuugguuuggaga

SEQ ID NO: 398848 - RNA, 64 nt, Homo sapiens
gugacauguaaggcucucucuguuaugucuagguggacacagcaaugcagugccuugcagucau

SEQ ID NO: 398849 - RNA, 101 nt, Homo sapiens
gaucuggaaaauagcaggaagauaagagggaggugccucagucccgugggcaguuggugacucaggcaccuuccucuuaucugccugugggcacccagguc

SEQ ID NO: 398850 - RNA, 125 nt, Homo sapiens
cccaccuuggccucccaaaguguugcguuuacaggugugugccaaggugcccacucaaaaacggguucuuggcugggcacuguggcucaagccuguaaucccagcaccuugggggucaagguggg

SEQ ID NO: 398851 - RNA, 65 nt, Homo sapiens
gucaucaggugaggauucaaugcacagcuaacaguacucugccuugaaguccucuucuggccgac

SEQ ID NO: 398852 - RNA, 69 nt, Homo sapiens
ggcugaugacuggagaccucaguagggucuccaugacaaagacucucucugauggaacuuuagccagcc

SEQ ID NO: 398853 - RNA, 56 nt, Homo sapiens
gagagagagagagagagagagagcacaugugugcaagcucuuuggugucucuucuu

SEQ ID NO: 398854 - RNA, 102 nt, Homo sapiens
cucuguucaugacaugagaaaaacagaaccauuagagggagauauucaaacuggguucuucucacccugggguucaaauaguuuccuaugggauguucagag

SEQ ID NO: 398855 - RNA, 90 nt, Homo sapiens
ugguucucaccuggagguccucguguaguacagucugauauugggugaagcugaggcuguagucauuugaaggauguccaaguugugcca

SEQ ID NO: 398856 - RNA, 66 nt, Homo sapiens
ugcauuugaguccauucgaugcugauuccauaugaguccauccaaugaugauuccauucaugugca

SEQ ID NO: 398857 - RNA, 103 nt, Homo sapiens
agaauuuuccuuagacaagcuuccugcucacuacauuccaaccuuguuucuccccuaccagguuugaauguaaugagcaggaagcccgucuaaggaaaauucu

SEQ ID NO: 398858 - RNA, 77 nt, Homo sapiens
cacuuuucccaagucaggucaugauaagacucaauguuaauuauugacuucauuuuuggccaugaggggagguagug

SEQ ID NO: 398859 - RNA, 55 nt, Homo sapiens
guggaauuauagagacaucuugaacuuaagaaaugcuguguaccuaugguuccac

SEQ ID NO: 398860 - RNA, 63 nt, Homo sapiens
ccauguguccauguguuuucaucauuuagcucccaguuauaagugagaacaugugguauuugg

SEQ ID NO: 398861 - RNA, 59 nt, Homo sapiens
uauucacuguaucauugaugggcauuuggguugauuccacgucuuugcuauugugaaua

SEQ ID NO: 398862 - RNA, 77 nt, Homo sapiens
auuuuuaaauauaugcauuaauaaagggcucuacaauucccuggaguauacuuggagugaugcaaaucuuuaaaagu

SEQ ID NO: 398863 - RNA, 79 nt, Homo sapiens
aggcuggagugcaguggcacaaucuuggcucacuacaaccucugccuccuggguucaagagauuccccugccuuagccu

SEQ ID NO: 398864 - RNA, 59 nt, Homo sapiens
cugcuguagguccaagaguccaaaagcagaagaacuuggagucugauguucuaaggcag

SEQ ID NO: 398865 - RNA, 100 nt, Homo sapiens
guuggccaggcuggucucaaacuucugaccucaggugauccacccaccuuggccucccaaaguccuggguuacaggugugagccaccacgcccagccaau

SEQ ID NO: 398866 - RNA, 68 nt, Homo sapiens
uggcaaauuccaaaguuaauucaaggucaaaagacugaauuuagaauuugauuuuaggaaguuuguca

SEQ ID NO: 398867 - RNA, 60 nt, Homo sapiens
ugguugaaguggaaauugguucaauuuuggaaaacaguuuggcaguaucuacuacagcua

SEQ ID NO: 398868 - RNA, 69 nt, Homo sapiens
gaugugcuccucucuguccugcuguauguucagguuuccuaguaucaagccacacauggucagcacauu

SEQ ID NO: 398869 - RNA, 65 nt, Homo sapiens
uccuuugccauuuucccgucgcuugaagcugauugaggcaucagugaacgaggaggaggguggga

SEQ ID NO: 398870 - RNA, 73 nt, Homo sapiens
ugggauucacagugaacugguggguuuuucacuuucuuugaagagcccaaaggcauuuacugacaugaucuca

SEQ ID NO: 398871 - RNA, 74 nt, Homo sapiens
aaggaacacuucuacacugcuggugggaauguaaacuaauacaaucacuauugacaacaguguggagauuccuu

SEQ ID NO: 398872 - RNA, 120 nt, Homo sapiens
ugcaucuauugagauaaucauugguuuuugucguugguucuguuuauaugcuggauuauguuuauugauuugcauauguugaaccagccuugcaucccagggaugaagcucacuugauca

SEQ ID NO: 398873 - RNA, 97 nt, Homo sapiens
ggcacauucaguccauagcacauggcauccucucuuggggcacaguuuucaaugguuucccaagagaggaugccaugugcuacggacugaauguguu

SEQ ID NO: 398874 - RNA, 74 nt, Homo sapiens
ucagaugaggucaggacauuuuugcuuugugacagauuugggacgcagagaaaagaguucaggcuuuguacuga

SEQ ID NO: 398875 - RNA, 66 nt, Homo sapiens
uaugucaugggguuuuugagauaacuaaauuauuuacguaaguugcugaagacacugcauggcaua

SEQ ID NO: 398876 - RNA, 66 nt, Homo sapiens
guuuuauugaaacacagccacacucauuuguuuauguguugucuauggcuguuuucaugcuagaac

SEQ ID NO: 398877 - RNA, 56 nt, Homo sapiens
aaggaauuauacuauacauugggugacugugucaucacccucuaggaugauuucuu

SEQ ID NO: 398878 - RNA, 105 nt, Homo sapiens
gcuacaugucaggauggaucuaauaugccacuucucuaagucauguauuugaaaugccacuuauguugaccuuuaaguaguauguuugauuucugauaauauggc

SEQ ID NO: 398879 - RNA, 58 nt, Homo sapiens
gagaaugaugguuucguuucauccaugucccuacaaaggacaugaacucaucauuuuu

SEQ ID NO: 398880 - RNA, 60 nt, Homo sapiens
cugaacagguacugugcacacauggacacugaacagguacuguggcacuguaucucucag

SEQ ID NO: 398881 - RNA, 83 nt, Homo sapiens
gagaauccaugguuagauguauccuuuccaucugggggccugagaaaccagcugggagauacauuucuagcucuucuuuuuuc

SEQ ID NO: 398882 - RNA, 114 nt, Homo sapiens
cagacauagaauguucgcugccuuucuaaugacauucacagaguuauuuuuaugcuuaaucaaaugagucucagacagcuuuugaauauggaaaggaugauacacaaauguuug

SEQ ID NO: 398883 - RNA, 124 nt, Homo sapiens
uaacuuuaugcuaauuuuuucuuugccuagcauagugccuugaaaacaaugacaauaacaacuacaacugucauuuucaguuaccuacugugugcaaaggacuuuuaaccuuguauaaauguug

SEQ ID NO: 398884 - RNA, 64 nt, Homo sapiens
ugaugauaugagaaaggaucaacaaagcacuacaagcugauguuaugcuuaauuuuaugcauca

SEQ ID NO: 398885 - RNA, 59 nt, Homo sapiens
ugagacgggagucuugcucuguugcccaggcuggaguguaauggcaugaucucggcuca

SEQ ID NO: 398886 - RNA, 63 nt, Homo sapiens
ugcacacugcagucaccaaggagguaacuuuccaccauuacuugagacaaaugcgugugugca

SEQ ID NO: 398887 - RNA, 58 nt, Homo sapiens
ugagaugaguucucgcucugucgcccaggcuggagugcaguggugagaucucggcuca

SEQ ID NO: 398888 - RNA, 111 nt, Homo sapiens
cagaucaucaggcauuagauuaucuuaaggagcaucaaccuagaucccuugcauggguaguucacaguaggguucaugcuccuaugagaaucuaaugccacuacugaucug

SEQ ID NO: 398889 - RNA, 63 nt, Homo sapiens
ugacuacagauuugcugccagaauggauacgaaagaauuccauuggccaggugcuguggcuca

SEQ ID NO: 398890 - RNA, 130 nt, Homo sapiens
agugcugugaguccgggaugaaguagcaguuacaggacuaagcagcuuugccuauucauuuugacugcaaggacaccuccuuggucuugucgaaacuguggaccucauuuuguuuauuuauuuauuuauu

SEQ ID NO: 398891 - RNA, 89 nt, Homo sapiens
ugagauugacaaucucacgugugucuuuguuccagguacgagagucaacacuuuguauguugggucaaaguacaugagucccaaucuca

SEQ ID NO: 398892 - RNA, 67 nt, Homo sapiens
guguugaaugccuagugugugacaggugcugugcuaagcauuucauauacauuagcacuuuuaacac

SEQ ID NO: 398893 - RNA, 92 nt, Homo sapiens
ggguuuuggagugauggagaccuuggaacaaaucuuggcucuaacacuagaguuuugagaucuuggccaaguuucuuagcuccuacaaaccc

SEQ ID NO: 398894 - RNA, 69 nt, Homo sapiens
aggccuuggcaguugacuaaggauacccacuucacgguagacauaguucauuagucaccuagccagcuu

SEQ ID NO: 398895 - RNA, 62 nt, Homo sapiens
gugguugcuuugugccaccauuauuccugacucugaauuuugaugcuaccuaaagcaaccau

SEQ ID NO: 398896 - RNA, 55 nt, Homo sapiens
ccuaggcaauguacauaucggcccauguuacagauggggaaauggacuugccagg

SEQ ID NO: 398897 - RNA, 90 nt, Homo sapiens
ggcugcacuugagugacauaaagugggggcuguguuggucauguacauagcauaucccacaugucagagauucccuuuuagugccuagcu

SEQ ID NO: 398898 - RNA, 128 nt, Homo sapiens
gccaauuuaaauuugaauuucagauaaaugauacauuuuuuaguacaagucugucccaugcaauauuugggaucaacuuauacuaaaauuguuuuguuguuguuucucugaagucaaauuuaacuggc

SEQ ID NO: 398899 - RNA, 69 nt, Homo sapiens
ucgugcacagucaacacuuauucaccaucaggcaauccaugguguagggaaacuugacuaauguaauga

SEQ ID NO: 398900 - RNA, 80 nt, Homo sapiens
gauugcugagcugacuuugauguugguguuuaaugauaaacagauuucagauaacacggcccgcagagcaagcuguaauu

SEQ ID NO: 398901 - RNA, 60 nt, Homo sapiens
guugcaugucugggaggccagcccugucccccuucccugcucaucucccugacacucaac

SEQ ID NO: 398902 - RNA, 98 nt, Homo sapiens
auauuuggugggaacauuuaggggagucauuaacacaaugcaaaacacauaaauuuugcauuguauuguugacucgccuaaguguccccacaaaaugu

SEQ ID NO: 398903 - RNA, 83 nt, Homo sapiens
gcuggaggaaugcagaggcgggcgggggcgcgacaggcugcuaggcaccgugcccacugucuguccuguagcuuccuaccagc

SEQ ID NO: 398904 - RNA, 104 nt, Homo sapiens
cuugaggcacuguagugaaacuuugucauuaguaacgacuuuugucuaacacagauuaaccaaucaagagucaaaugcuuauguauaaagcacacugcuuuaag

SEQ ID NO: 398905 - RNA, 82 nt, Homo sapiens
uguaaaauggcuuucuccuacuuaaggccuuccaaugguucuuaucauggaagacucaagguggugaauaccaugaucuaca

SEQ ID NO: 398906 - RNA, 74 nt, Homo sapiens
gggacaugggcaagaaaaaaugccacaaaacauaucaccauuuugaguguggcuuuuucuuggcugaggguucu

SEQ ID NO: 398907 - RNA, 57 nt, Homo sapiens
ugaacuguugggggaaauucagccagauaucaggcaaaauucacccccgauauuuca

SEQ ID NO: 398908 - RNA, 57 nt, Homo sapiens
cucaccuugugauccacccgccuuggccucccaaagugccgggauuacaggcgugag

SEQ ID NO: 398909 - RNA, 58 nt, Homo sapiens
gcaguagguacuucugguuucuggucugacaaguaaggagcuuagaaguugccauugc

SEQ ID NO: 398910 - RNA, 58 nt, Homo sapiens
uaggucaguuuuggcuuggcuuggcugagauuggcuggguuugucuagacuggcucua

SEQ ID NO: 398911 - RNA, 70 nt, Homo sapiens
gguaaauaaagccugucucuuuagaguauaacauuucaaagugcuucggugaauugcaggcuuuaagacc

SEQ ID NO: 398912 - RNA, 67 nt, Homo sapiens
guguauguguuuaugggguacaugagaugcuuugauacaggcaugcaaugugaaauaagcacaucau

SEQ ID NO: 398913 - RNA, 103 nt, Homo sapiens
uuagggcauuuucauauauucuugugauuauaaaguaguauguucaaguuuuaguaaauuaauauuacguuaucagguaugcaagaggagugagaaccacuaa

SEQ ID NO: 398914 - RNA, 85 nt, Homo sapiens
ucuuauuuucuguagugccuaccacagcuucagacauuccuugggaacugcucuaauguggugggaggcugcacagacaguggga

SEQ ID NO: 398915 - RNA, 91 nt, Homo sapiens
cuaaguguucucagguaaagcugucaaggcaggaggcugagugaggacacaccagcuuuaccugccuuggggcacuccugggauugauugg

SEQ ID NO: 398916 - RNA, 94 nt, Homo sapiens
cccucaggugauucauaaguccaugaagucuuguggguuagaaccacuaacccacaagcccuugucaugggaugcagcaugauccaccuggggg

SEQ ID NO: 398917 - RNA, 109 nt, Homo sapiens
uuagcaugcugacuugagacugaaacuggccuccuugggaaauuaggcugcuauuucucucgccugauuucuugggaagucagauaacaacucaguguugguuugcuga

SEQ ID NO: 398918 - RNA, 96 nt, Homo sapiens
aaguauugguuuugugaauaugagagcugacuuuaaggcaauuuaaguuaauggauuucuugauucuaggggcucucuuauguuaaggucaaacuu

SEQ ID NO: 398919 - RNA, 57 nt, Homo sapiens
gcccaggaggagaggcuguggugagccgauaucgugccauugcccuccagccugggc

SEQ ID NO: 398920 - RNA, 86 nt, Homo sapiens
uuuccagagguccuauggagugauacaguuuacauuccagagguccuauggagugauaucacuguaucacuccauaggacuggaga

SEQ ID NO: 398921 - RNA, 72 nt, Homo sapiens
uauuuaugauauggguugucaguuguaggacacagaguauuacaaucugggauucagcccauuuuucagaua

SEQ ID NO: 398922 - RNA, 57 nt, Homo sapiens
gaugaggcuagagacauguguagggagcauaccauagacagauuuguaggucuuauu

SEQ ID NO: 398923 - RNA, 59 nt, Homo sapiens
ugagacugaguuucgcucuuguugcccaggcuggagugcaauggcgugaucucggcuca

SEQ ID NO: 398924 - RNA, 66 nt, Homo sapiens
uagcaucuacuccaugagauuguugaaguagccaaagcucuuagaauagugucuggauccaagcua

SEQ ID NO: 398925 - RNA, 66 nt, Homo sapiens
ugucuuugguucuguuuauaugcuggauuacguuuauugauuugcauauguugaaccagccuugca

SEQ ID NO: 398926 - RNA, 79 nt, Homo sapiens
uucgagaauguaaaccgugcacucccaggaaaaugcagacacagcacgccucuuugggaccgcgguuuauacuuucgaa

SEQ ID NO: 398927 - RNA, 64 nt, Homo sapiens
auugugaauagugcugcauuaaacauacgugugcaugugucuuuauagcagcaugauuuauagu

SEQ ID NO: 398928 - RNA, 84 nt, Homo sapiens
caagcaucucuguccacauugcucuuaccaaguuugucacaccugaagaccaggccuaggagcaauaugacaagaggguccuug

SEQ ID NO: 398929 - RNA, 59 nt, Homo sapiens
ucgcugggaagacugaagugucaaaauuggaagcaaagaaacuaaagcuucucaaguga

SEQ ID NO: 398930 - RNA, 75 nt, Homo sapiens
ggguguacacccacugugauauuaaaaggaauaucuuucuagaacauuacaaauaguaucacaagguguacaccc

SEQ ID NO: 398931 - RNA, 56 nt, Homo sapiens
ucaggcaugcagcaaugcagugacaguaacacaugcagauggaaggcauagccuga

SEQ ID NO: 398932 - RNA, 67 nt, Homo sapiens
uuuucagcagugugaaaacaaacuaauacaguaaauugguacuaguagagugggacguugcugaaaa

SEQ ID NO: 398933 - RNA, 59 nt, Homo sapiens
aucagcagcgguggcugcagaacagcguauuuuggugaacugcaaaugcugcugcugau

SEQ ID NO: 398934 - RNA, 76 nt, Homo sapiens
caaauggcuagauauccagaguucugagaccaggucugaccugggagcagagaagagcugauguuuaagcuguuug

SEQ ID NO: 398935 - RNA, 91 nt, Homo sapiens
gagugagacaagacaaagaaguggaggggaagcugugcgauuuugggcauggauugcacagucuagcuccaccuuuuauuuuauuuuauuu

SEQ ID NO: 398936 - RNA, 81 nt, Homo sapiens
gugucaguagaaaagacaguuuuuucaacaaauggugcuggaacaacuggcaugcacaugugaaaaaaugaaucuagacac

SEQ ID NO: 398937 - RNA, 60 nt, Homo sapiens
gaucucaagagacuaagaaagggcaauaauaguuguugcaccugccuugcuuuagagauu

SEQ ID NO: 398938 - RNA, 57 nt, Homo sapiens
uuucaugggaaaagcagagugcaaaauucucagccuaccuuugccacuucccagaaa

SEQ ID NO: 398939 - RNA, 60 nt, Homo sapiens
uagaauugugacagggauuggccuuaugcgaucgcuguaaggcuguuaucuucacgucug

SEQ ID NO: 398940 - RNA, 60 nt, Homo sapiens
guacuaccuguaagauauacuguguauaagcaguauacacaguaagcacaguguagauac

SEQ ID NO: 398941 - RNA, 99 nt, Homo sapiens
ugcacucauccauccacuuagucacacacucaacuuuucaucuugggugauggagguugggaugcuugugauuuuggugaggauagagauugagaugca

SEQ ID NO: 398942 - RNA, 71 nt, Homo sapiens
ggauuuguuuugccaguauuuuauugaggauuuucacaucaacguucaucagggauacuggccuuaaauuu

SEQ ID NO: 398943 - RNA, 98 nt, Homo sapiens
gcgaucacggguuuuggcagugcccgaugcuggggcuugggucugaugugaccccgauuccuucuccagugcgggacucccgccgcccuaacuuucgc

SEQ ID NO: 398944 - RNA, 66 nt, Homo sapiens
gccuagagcuucaaaguuggcuaggagacaccccaggggugucuuaggaucaauuuuggauugggc

SEQ ID NO: 398945 - RNA, 126 nt, Homo sapiens
guaaacaagcuguugucauacuugaguccuugaguauugaauuugagcugucucuuagugacaauaccaaguagauaguuggauauucaaaucuggggcuuaggcagaggccagggcuauguauau

SEQ ID NO: 398946 - RNA, 95 nt, Homo sapiens
cagaucaacugucauaucacagugcuuguguucagguaaccuuuauuuuacuaauaauggccccaaagcacaagagcagggaggcaguugauuug

SEQ ID NO: 398947 - RNA, 67 nt, Homo sapiens
cugagcccagaaguuagaggcugcaaugagccaugauagugccauugcacucuagucugggugacag

SEQ ID NO: 398948 - RNA, 65 nt, Homo sapiens
uuaggucuuaagucuuuaaugcauuucgagugauuuauuguguauguuguaagacuuagaccuag

SEQ ID NO: 398949 - RNA, 57 nt, Homo sapiens
aucuuuaguggcuguuuucagagagaagcaccuucaccaaacagccuagcuaaggau

SEQ ID NO: 398950 - RNA, 57 nt, Homo sapiens
ugagagacaguuucgucggaggcguucuuuggguugcagauggacugcugucucuca

SEQ ID NO: 398951 - RNA, 95 nt, Homo sapiens
cagaagacuacuauuacauauucucccucauaugcaggagcuuaaaaaguugaucucaugaagguggagaguaggauaaugguuaccagagucug

SEQ ID NO: 398952 - RNA, 65 nt, Homo sapiens
guaaguuguaguuagagaguugcuaaccaacuaggauggcaauugucagacaugcaguuucuuac

SEQ ID NO: 398953 - RNA, 90 nt, Homo sapiens
uucauucgaaaauaacuuccuagaauagacagugcugucagcaucuuucugcugaccauagacuacucugggcgguauuuugaaaaugaa

SEQ ID NO: 398954 - RNA, 71 nt, Homo sapiens
gcugcugacgaugaauauuuaacgcugugagcagaugcucacaguauggggggugguuauaaaauagcagc

SEQ ID NO: 398955 - RNA, 56 nt, Homo sapiens
aggauuauuauugugaugugguuuacacucgucauuucacagucacacauaauccu

SEQ ID NO: 398956 - RNA, 60 nt, Homo sapiens
uucaauaaaugucacuuuuugcuaguguucuugucugguaggcaagguguuauuauugaa

SEQ ID NO: 398957 - RNA, 66 nt, Homo sapiens
ugcuugagcuggggggauggaggcugcaaugagcuauaauugcaccacugcacuccagcuugggca

SEQ ID NO: 398958 - RNA, 66 nt, Homo sapiens
cucuggcccugcauugucaaggccaagccucagcugagguuuugcccacauguagguaugccugag

SEQ ID NO: 398959 - RNA, 79 nt, Homo sapiens
gacaguuggcaaguucagggcagaaguuuuugaaggcauuguauguuuccacuuuuuccuugugcuccugucacuuguc

SEQ ID NO: 398960 - RNA, 82 nt, Homo sapiens
ccucagggaaagagaacuuucuguguuuuuaucuccacccccaguggaaggauauguugaguagaguuuuugcuuuuugagg

SEQ ID NO: 398961 - RNA, 83 nt, Homo sapiens
gugguuuuugucuuugguucuguuuauaugcugaauuacauuuauugauuuguguauguugaacccaaaggaauauaaaucau

SEQ ID NO: 398962 - RNA, 129 nt, Homo sapiens
auuuuugacaaagaugugaaggcuauucaaugggaaaaggauggucuuuucaacaaaugguauugaaacaauugaauguccauaugcagaaaugaacuuugaccauaagcucacaucuuguacaaaaau

SEQ ID NO: 398963 - RNA, 59 nt, Homo sapiens
uagagcaaugacucuggaaaccacuagaagugaggcaggcauccaguaguccugcucua

SEQ ID NO: 398964 - RNA, 61 nt, Homo sapiens
uacuaccacaaaaugcauacaugcgucuucauggugcuguguacaaauuucugugguggug

SEQ ID NO: 398965 - RNA, 58 nt, Homo sapiens
gugacauuauuucagcuacaugagugaccuuagacucauguggcugaaauaaugacau

SEQ ID NO: 398966 - RNA, 78 nt, Homo sapiens
gacuuggaugucuggcaccauuuugaucaaaggcucaaaccugugccucuugacucugguguccagugcugggaaguc

SEQ ID NO: 398967 - RNA, 124 nt, Homo sapiens
ggccuccagaacugugagaaaauaaauuucuguugcuuaagccacccagucuguggguagcacagacucaugguagccugagccaacuaauauggugcuauuccucacuccuaucccuguugcc

SEQ ID NO: 398968 - RNA, 63 nt, Homo sapiens
uucaguuugccaguauuuuacugaggauuuuugcauugauguucaucaggauauuggccugaa

SEQ ID NO: 398969 - RNA, 99 nt, Homo sapiens
gagguaggagaaucgcuugaacuugggaggcagagguugcagugagcugagaucaugccacugcgcucuagccugggagacagagagagacuccaucuc

SEQ ID NO: 398970 - RNA, 83 nt, Homo sapiens
uccccaguucugaaccuuuguggcugagcgucugcuucucuggucuguuucuguaucagcacaguggguucauggaaagggga

SEQ ID NO: 398971 - RNA, 66 nt, Homo sapiens
caccuacauuuguaugaucauugcagcacuacugacaauagcaaagucauggaaucaaaugaggug

SEQ ID NO: 398972 - RNA, 74 nt, Homo sapiens
ggucaccaggugcuuuucagaagcuguugaccguaauucucuagcaguacauaaaaagcauccuggucuuggcc

SEQ ID NO: 398973 - RNA, 72 nt, Homo sapiens
uaggaaggacuuagucuuacaacuugggugucggcuccaccacaguagaauagagcacuaggucgaauccua

SEQ ID NO: 398974 - RNA, 90 nt, Homo sapiens
guuucacaguaggucugccccgggugaugcagccgucagucgggggccccugugugaagcggccgucauccggggaccccugugugaagc

SEQ ID NO: 398975 - RNA, 76 nt, Homo sapiens
aaguacacuugaaagagggccaagggggcaacuugagagauucaagugcccuauuuggcccuugauagggagauuu

SEQ ID NO: 398976 - RNA, 55 nt, Homo sapiens
agauuucaguauuucuacuacggacaaucccagaguggauuuuagacugagauuu

SEQ ID NO: 398977 - RNA, 77 nt, Homo sapiens
uauucaauuugauggcauguaauuauucaaaguggucucuuaagauccuuuguaguuuugugcuaccaguuguaaug

SEQ ID NO: 398978 - RNA, 79 nt, Homo sapiens
gcuggccgcacccacggucacugugcaguucugugcccgcagguacacaugcuccacuguggccucugggcccgacagc

SEQ ID NO: 398979 - RNA, 65 nt, Homo sapiens
uugugguaggcauguaagaugaauagacauguaauuauauauuuauuuuacaaaugcuucuauag

SEQ ID NO: 398980 - RNA, 75 nt, Homo sapiens
auucccagugcugugcaguguaugaguuucuaaaacaaccagaaugugcuucaaaacaccacagacauugugagu

SEQ ID NO: 398981 - RNA, 63 nt, Homo sapiens
aggaguuaucauguaguaagacacauuuagaaauuacuaaauguguggacugaugagagucuu

SEQ ID NO: 398982 - RNA, 68 nt, Homo sapiens
ucuccuugauuugggacuuaaugaaauuacauguuaaccaauugagucauuucaaauccaagaugaga

SEQ ID NO: 398983 - RNA, 59 nt, Homo sapiens
uucucuuuccacagcauguccaugcuacccuuuagugugcaauuuugugggaggcagaa

SEQ ID NO: 398984 - RNA, 84 nt, Homo sapiens
accuuugaauuauucugauuuuugcauggcuuucaagcugaaccuuguaaaugaauaguuugacagaacucuuuaaugaagggu

SEQ ID NO: 398985 - RNA, 78 nt, Homo sapiens
caguaauaauaaauaugguuuuaugaagcaauugugcaucgugcaugugaguuggauuguaaaauguauuucuugcug

SEQ ID NO: 398986 - RNA, 64 nt, Homo sapiens
cagcaagucucuaagaguucauaaugcuauuccgcugggaagugacuuacucuagagaaugcug

SEQ ID NO: 398987 - RNA, 65 nt, Homo sapiens
gauuacaggcgugagccacugcgcccggccacagccauuuauuuugcaguguucugaccugaauc

SEQ ID NO: 398988 - RNA, 72 nt, Homo sapiens
ugaauuuggaauguaacuugaaacuuuuaucacacauuuugucaaaaguuuauacuacauuuuggggauuca

SEQ ID NO: 398989 - RNA, 123 nt, Homo sapiens
agggaguagccucugguccuuuuguuacuuaggcuuggaaaguuaggguuuuccuuucaauuuaguuuuaggaaguuggcgugaaacagccuuacauucccugccuccagacccuauucuccu

SEQ ID NO: 398990 - RNA, 64 nt, Homo sapiens
aguuacacugaauugguuugccaacagcaauacugaagggcaagauagauaucagugucaaacu

SEQ ID NO: 398991 - RNA, 75 nt, Homo sapiens
guuuaucgcaauguuuagaauuuuguuauguucaaucgaggacuuuacaaaauuguguuaaacuuuaugauggau

SEQ ID NO: 398992 - RNA, 65 nt, Homo sapiens
ucuguauuuuaugaaauacgggugacagaggaacuauccuuugucccccguaguucauauacagg

SEQ ID NO: 398993 - RNA, 57 nt, Homo sapiens
gaaguucacagugacuuauauuuugauauacagauauuugguuaccugugggucuuc

SEQ ID NO: 398994 - RNA, 74 nt, Homo sapiens
cucuccugugucaggcacuaguaagaaaaaggcacaacgcuuuuuccucguagagccuaaugucuagaggggag

SEQ ID NO: 398995 - RNA, 76 nt, Homo sapiens
cucaccuggagagcuugcuaauacacugguccccauccuaaucccccaagguaaaggcaaacucuccaaggauggg

SEQ ID NO: 398996 - RNA, 64 nt, Homo sapiens
auugugaauagugccgcaauaaacauacaugugcaugugucuuuguaguagcaugauuuauaau

SEQ ID NO: 398997 - RNA, 67 nt, Homo sapiens
aauagauacauuggauaauggugggcauacaauaguccuaugcccaccauuaaaacaaguauauauu

SEQ ID NO: 398998 - RNA, 57 nt, Homo sapiens
ugagacugagucuugcucugucacccagguggagugcaauggcaugaucucagcuca

SEQ ID NO: 398999 - RNA, 80 nt, Homo sapiens
aguauaaauaaaggugcuguaagcauccauguggagggcuuuauguggacauauguuuucagcuccuuuagguaaauacu

SEQ ID NO: 399000 - RNA, 67 nt, Homo sapiens
ugaacuuuaguuuugaagguuguuaguguccauguguaggaaauuggcaauggcaaagcagaguuca

SEQ ID NO: 399001 - RNA, 127 nt, Homo sapiens
guaacauuugcagaauuaagacuauacaccuuuuggcauuguggauggaaucauuucaauugcagagcauuucagcuauaugggaguucuauucaucaugucuaacgguuaguucccauauguuuac

SEQ ID NO: 399002 - RNA, 63 nt, Homo sapiens
uguuacagcagcacaaaauggaccaaggcaaauauugguacccagaauguggcugcuguaaca

SEQ ID NO: 399003 - RNA, 89 nt, Homo sapiens
gggggcgcucggcucagaucacuggcgcuggcggagacaccaagucuguagacuggcuccgagguggccgguggucuaggggacccccc

SEQ ID NO: 399004 - RNA, 91 nt, Homo sapiens
cccagucacagaggauaaaucuuggcuagucuaagcuagugcuaguagucgcauuuccuuuugccaaugauuuauuucaggugaucauggg

SEQ ID NO: 399005 - RNA, 67 nt, Homo sapiens
guuaaugugagugcucauuuucaucguaccccgugguacaucauauguggaaauggaauuuacuaau

SEQ ID NO: 399006 - RNA, 67 nt, Homo sapiens
ccaguaauuugcagacucuagcauguaucagaaugccuugggagcuuguuaacaugcagauuacugg

SEQ ID NO: 399007 - RNA, 75 nt, Homo sapiens
ggaaagaacaggggaugagggagccaaagaccuugggcauguggcuuggcuuucuggggcuucuguucuaaugcc

SEQ ID NO: 399008 - RNA, 129 nt, Homo sapiens
guauacuugaaauaugcuaagggaauauaucuuaaguguucucaccgcagaaacaaggauaaaaacaagaaauuacuuugugaggugauggauaugucuugauuuugguaauuauuucacauuguguac

SEQ ID NO: 399009 - RNA, 116 nt, Homo sapiens
cccagcaccccccgcccagcuccccuaaugcacuuuccuccaaggcuggugaacuagacagaccggccaugggaaggaagaguguguaaugaccguggcaggggagggcugcuggg

SEQ ID NO: 399010 - RNA, 64 nt, Homo sapiens
uuggagcccuaacucucaguacuucagaaugugacuguacaguaucugcagaaagggccuucaa

SEQ ID NO: 399011 - RNA, 67 nt, Homo sapiens
ugggcaaggaugagugcccaugagaucugcuucuuuaaaggcgucucucucacuccuccucgcgcca

SEQ ID NO: 399012 - RNA, 70 nt, Homo sapiens
aagucuuugcuauugugaacagugccacaaugaacacaugugugcauaugucuuuauaguagaaugauuu

SEQ ID NO: 399013 - RNA, 85 nt, Homo sapiens
cggcuguccucuccaacaauauccuggugcugagugaugacucaggcgacuccagcaucagugauuuuguugaagagggcagcug

SEQ ID NO: 399014 - RNA, 56 nt, Homo sapiens
ugaguucuuuuacauuuugaaugcaaugauagacuguggaaaggugaaggaacuca

SEQ ID NO: 399015 - RNA, 69 nt, Homo sapiens
gguaccuauggcagccacggccuggagauugugaugcucagcuuccacggccggcgugccaggggcacc

SEQ ID NO: 399016 - RNA, 76 nt, Homo sapiens
cucucauaagcaauuuccauucagguucaagucaucaucgagaggagaugaugccuagagucaguggaggugagag

SEQ ID NO: 399017 - RNA, 87 nt, Homo sapiens
guccacagagaucagcaguguugugauccaggucuucuauuuuaagggacauauauaagacagaugcaaccugcuagcuauggagac

SEQ ID NO: 399018 - RNA, 63 nt, Homo sapiens
ccaguaugcguucucuuggauagcagauggauggauggcugccauucauggaggagcaauugg

SEQ ID NO: 399019 - RNA, 79 nt, Homo sapiens
cguugacugccaacccgugcagagcgcuuagugcguguccgaccgugagcugagcgcugugaugcgggugcuguuaaug

SEQ ID NO: 399020 - RNA, 63 nt, Homo sapiens
ugugggacacuucugggcuauuuucaugaucacaagugucuauagcucagugguguugccaua

SEQ ID NO: 399021 - RNA, 57 nt, Homo sapiens
guguagguaagguuaugguugacuagaaagcagaaaugguuaccagcauaccuacac

SEQ ID NO: 399022 - RNA, 90 nt, Homo sapiens
uaaugaccuugaccauuuugaggaguacugauuagguauuuuguagaauguccuuuaauugguauuuuucucauguuuuucuugugauua

SEQ ID NO: 399023 - RNA, 76 nt, Homo sapiens
augcuacauuggaaaauucuacuucaucugcuuugcuccuuguaaaugaggagguaugauuuucugaacuggguau

SEQ ID NO: 399024 - RNA, 75 nt, Homo sapiens
cuggauuugguuagccaguauuuuauugaggauuuuugcaucaauguucaucaaggauauuggucugaauuacag

SEQ ID NO: 399025 - RNA, 59 nt, Homo sapiens
gugagaauugacacccuugucuguuacugaucuuagaagggguauauucaauuuuucau

SEQ ID NO: 399026 - RNA, 61 nt, Homo sapiens
ggauuagggugggguggccaguuuuuugugucuuaugcaaauggcacaccuagcccuaacc

SEQ ID NO: 399027 - RNA, 57 nt, Homo sapiens
gcugacucaguuucucagguaguaaucuacuauagacugcugccaaacuggggcagu

SEQ ID NO: 399028 - RNA, 55 nt, Homo sapiens
gacaauauuaagagaagacagcccauguuaauggauugaaagcuuuaauauuguu

SEQ ID NO: 399029 - RNA, 70 nt, Homo sapiens
cuagugcugacugaggaagcgcucucuccugggccuggcuuccaaggagggggcuuccucggaguccugg

SEQ ID NO: 399030 - RNA, 63 nt, Homo sapiens
uuuuucuacaucugagaauucauacuggugagaaaccuuaugaauguaaagaaugugggaaag

SEQ ID NO: 399031 - RNA, 63 nt, Homo sapiens
caucugcaaauacuugugggauuuuuagcacagcaaguggaaaaucuguccagguaucagaug

SEQ ID NO: 399032 - RNA, 102 nt, Homo sapiens
uugaggcagagucgugcucugucaccuagacuggagugcaguggugcgaucuuggcucucugcaaccucugcgucugggauucaagcauucuccugccucag

SEQ ID NO: 399033 - RNA, 83 nt, Homo sapiens
cucccaugacccaggauuccaguuugugagaagcugugccaugugcaaugguuaacauuccagauuggagccugacacgggag

SEQ ID NO: 399034 - RNA, 70 nt, Homo sapiens
cugggcuauguaggaguggaguuuucaacacacaauuuucaaauggguaauugcacuaagcauaguccag

SEQ ID NO: 399035 - RNA, 80 nt, Homo sapiens
gccucugcuggccggcuguacccugaggugcccucucacuuccuccuucagguucucagcggacaggccggccaggaggu

SEQ ID NO: 399036 - RNA, 76 nt, Homo sapiens
aggcgaagcuaugaagccagccauaugccauguuauaauuaugaugccguaaaucucuguuuucauggaccugccu

SEQ ID NO: 399037 - RNA, 93 nt, Homo sapiens
aauuugauagucuuugauagcaauaugacauugcuacauccaagugugggagucaguacacuuauauugcgcauaucuuggacauuuuagguu

SEQ ID NO: 399038 - RNA, 69 nt, Homo sapiens
uuugcuguuugguuggcuuagccauuccagccuuugggcuuuggaaaguccaagccaaccgggggcaga

SEQ ID NO: 399039 - RNA, 83 nt, Homo sapiens
gauacuaacagauaugccagggagaauuguucaaguaacaugauaaugauuuuggggaaagucccugaguuucugugaauauc

SEQ ID NO: 399040 - RNA, 71 nt, Homo sapiens
ugauccuacagaaccaugcuuuucuuaccaguguuuaauauagagucaaauaagcauggguuuuaggguca

SEQ ID NO: 399041 - RNA, 69 nt, Homo sapiens
gcuacugugcaaaaaugaauauuguaauauuaaaagagaaacuaauuguucaguaucauugcacauagu

SEQ ID NO: 399042 - RNA, 105 nt, Homo sapiens
uuuugcauggcuagauaugugcuggaugacuaagaauuuuauaauuggcauaucaauaaucaaaucaguuuuccuaauaaaaugacaugucugauuucugcaaaa

SEQ ID NO: 399043 - RNA, 115 nt, Homo sapiens
agugccaggagaggaccggagcauaguuagugcuuauuaaauaguaucaugauaacaugacacauguaaaacacuuagcaauguucaauaaacucuggucccuuuccuccccacu

SEQ ID NO: 399044 - RNA, 82 nt, Homo sapiens
gguuauuaauccccuguuggauggugauaugguuuggauuuguguccccaccaaaaucucaugucaaauuggaggaagaacc

SEQ ID NO: 399045 - RNA, 69 nt, Homo sapiens
aucaucaucuccaauguuugugucuucacuuggcgaucuuugaagacauuuacaugggagacccuugau

SEQ ID NO: 399046 - RNA, 77 nt, Homo sapiens
ucgcuugaaccugagaggcggagguugcagugagccgagacugcgccauugcacuccagccucggcagcaagagcga

SEQ ID NO: 399047 - RNA, 86 nt, Homo sapiens
gagaauugcuugaacccagggggcagagguuacagugagccgagaucacgccacuguacuccagccugggugacagagcaagacuc

SEQ ID NO: 399048 - RNA, 63 nt, Homo sapiens
auggccuaugaccguuauguugcuauaugcaaaccucuccacuacaugacagucaugagccgu

SEQ ID NO: 399049 - RNA, 97 nt, Homo sapiens
uaguaagcuuggaaauguuuagauagcaucauuucuugaaaagaauguguauucucuuguuggaugugguguucuguacauuuaaauuugguuacua

SEQ ID NO: 399050 - RNA, 81 nt, Homo sapiens
guugggugauuuuucuguuucagaaaggacaggcuaagucagaguucagguauucuggaacagagaaacugucauaccaac

SEQ ID NO: 399051 - RNA, 90 nt, Homo sapiens
gcaauguuuccuuaaggcagauaagaauucagcaagcuuuauucaacaaacuugcagagaaauuucugguuuacuuccaggacacauugu

SEQ ID NO: 399052 - RNA, 86 nt, Homo sapiens
gggcuccuguuugcuucagaguaguuccuggcagaaagcgcugaguguaauuugcugacucugccauacugccucucagggagccc

SEQ ID NO: 399053 - RNA, 82 nt, Homo sapiens
cccagcugauuuuccugccuccuggcugguccagugugacccaguagacagaacaauggacuaggagcuaggaagaucuggg

SEQ ID NO: 399054 - RNA, 60 nt, Homo sapiens
cgcuggggaaugcagcuggggucgggggcaaacagagacauggccaguuuucccucagug

SEQ ID NO: 399055 - RNA, 82 nt, Homo sapiens
gaaggaauacaucuauuagguuggugcaaaaguaaucacgguuuuugccauuacuuuugcaccaaccuaacagaauucuuuc

SEQ ID NO: 399056 - RNA, 73 nt, Homo sapiens
uugauaucugaugccuauggaauauaaggaaacaauaacauuuaauccaucauucugauaggcacaauaucaa

SEQ ID NO: 399057 - RNA, 88 nt, Homo sapiens
cucagguauuucuuuauaacaaugcaagaauggccuaauacguaaaauuaguaccuaggaguggagcacuguuauaaagauuccugag

SEQ ID NO: 399058 - RNA, 118 nt, Homo sapiens
cugcacauccuuaaugcuccuugugcagugagaugacgacacaccucagugagaggaccacacgccucagugagaggucucaucucgcaggccgggcucaaagaggauggaccugcgg

SEQ ID NO: 399059 - RNA, 79 nt, Homo sapiens
uguguuuuuguggcauugcucauaucacugaaguagacaacaaaauucagucaguguguauugauggcacucagacaca

SEQ ID NO: 399060 - RNA, 75 nt, Homo sapiens
ugguuauuuccuaaguaggcaacuauaaagugugcacauacacauacuagaaauugcauacuucucagaugauua

SEQ ID NO: 399061 - RNA, 55 nt, Homo sapiens
cucuguuucucagccuauuuccacuuguauggagcaagugggcuagaaaucaggg

SEQ ID NO: 399062 - RNA, 77 nt, Homo sapiens
ggagaaguuuugugucuagcucagggauuguaaacgcaccagucagcacccugucaaaauggaccaaucagcucucu

SEQ ID NO: 399063 - RNA, 128 nt, Homo sapiens
auuuauaucccccucuccacuuuucaugcuacuuauuuguggaagaaaucagguuauuuguccuguagaguuuugcagucuagauuuugcugaauuuuucccuagcaagcauacucagauggaaaaau

SEQ ID NO: 399064 - RNA, 55 nt, Homo sapiens
cuggugucuggugauggagacaggaggcugggucugucuuggagccagacgccag

SEQ ID NO: 399065 - RNA, 88 nt, Homo sapiens
gggucuugcucuguugccuaggcuggagugcaguggcgcaaucucagcucacugcaaccuccaccuccuggguucaagcgauucuccc

SEQ ID NO: 399066 - RNA, 57 nt, Homo sapiens
gaaagagaggggcugagaugcagaccagucuguucucucaguggcuuccucacuuuu

SEQ ID NO: 399067 - RNA, 60 nt, Homo sapiens
agcugguccugugacuugcuucuuucaaauuucuuggccuggaaagugcaggcaccagcu

SEQ ID NO: 399068 - RNA, 78 nt, Homo sapiens
aagaacugacuuuugauaguuuuaaaauuaaucuuugcaugaagguugguuucgcuuuuauccuuuaaguuuguuuuu

SEQ ID NO: 399069 - RNA, 59 nt, Homo sapiens
uguguuauguauauuugagugugugauauauaucacaugugacauauauauuugauaua

SEQ ID NO: 399070 - RNA, 69 nt, Homo sapiens
gauuguuucuuucucugugagucauuuugaagaaauagaaugauccuucucagaggcacaagauagguc

SEQ ID NO: 399071 - RNA, 63 nt, Homo sapiens
auggcagcgugaauguggcugaacuuaaaaugcuuguauaacuucgacaucgcacgcuuccau

SEQ ID NO: 399072 - RNA, 64 nt, Homo sapiens
gaauaucccaaagaugaaauaacugcuuagagaaacagcaaguucucugucacuggggguauuc

SEQ ID NO: 399073 - RNA, 95 nt, Homo sapiens
ucauuucucuugcucucacaauugguguuuauggggaaguaucaacuacuugcagugccauuuccccaucaauuacuagagaguggggaaaguga

SEQ ID NO: 399074 - RNA, 71 nt, Homo sapiens
guugagaguuucacauuuucaauuagaagaaacacuuuauggcuucucuuuggcauugccaaacugucaac

SEQ ID NO: 399075 - RNA, 72 nt, Homo sapiens
agugcucaggcggcaauagugguagacagggcugggcaauucccaagucuccggauguuguuuuugggcacu

SEQ ID NO: 399076 - RNA, 76 nt, Homo sapiens
cucuguguguugcacauucuguggauguugacagcgguaugaugacacauaucuacaauuaugguaucacacagag

SEQ ID NO: 399077 - RNA, 61 nt, Homo sapiens
ggcaaaacagaagaggcuuguagccaagcuacuuaggucuacagugccugucucuuuggcc

SEQ ID NO: 399078 - RNA, 64 nt, Homo sapiens
cuagugcaguuccccugucuuaauaucagcucugucuaggcagcgggcaaggggaacccauugg

SEQ ID NO: 399079 - RNA, 93 nt, Homo sapiens
cugggucaaaugguauuucuaguucuagaucccugaggaaucgccacacugacuuccacagugguugaacuaguaaaucauacauuuaaccag

SEQ ID NO: 399080 - RNA, 62 nt, Homo sapiens
ccacucugagcaugacaucaugugacugugacccucaagucaccagucaugcugagaucugg

SEQ ID NO: 399081 - RNA, 55 nt, Homo sapiens
gcacuguugauaacauuagaaaguuugguuuucaagcuuguguguaucacagugu

SEQ ID NO: 399082 - RNA, 62 nt, Homo sapiens
uuguaugucuucauuugaaaaauguucauguccuuugcucacuuuuagaugagguuauacgg

SEQ ID NO: 399083 - RNA, 79 nt, Homo sapiens
cuuuucaauuaucuuuguaugaccuacuacacuaaaggcaucuugaagcuauguaugguuuauagggaaauuguagaag

SEQ ID NO: 399084 - RNA, 66 nt, Homo sapiens
cccaaugaccagaacacagaacaauuuucucucucuuuccucugguuugugcauugggccauuggg

SEQ ID NO: 399085 - RNA, 92 nt, Homo sapiens
gcccuuaugccuaggaucuugcauauuauaugugccuuauuaaugcuugcaauuguaagugcacuguaagugcaggaugagggcuacagggc

SEQ ID NO: 399086 - RNA, 70 nt, Homo sapiens
auggacacuaaggaaggacugaaaggacaggagcuauaggcugcucucucuuccccuuuccuuguuccau

SEQ ID NO: 399087 - RNA, 67 nt, Homo sapiens
gugggguaaggagcaaauaucuuuuuagcuccuagggaaggagcugaaguuuccauuuguaccucac

SEQ ID NO: 399088 - RNA, 94 nt, Homo sapiens
gaggcaggagaaucacuugaagccaggaggcggagguugcagugagcugagauugugccacugcacuccugggugauagagggagaccugucuc

SEQ ID NO: 399089 - RNA, 55 nt, Homo sapiens
uguagccuacuucacaccuaggcuguauggcauaaccuaguguucuuaggcugca

SEQ ID NO: 399090 - RNA, 57 nt, Homo sapiens
cuacgguuuguauaacuccucauguuccauuacaugugcagauguuacaaauuguag

SEQ ID NO: 399091 - RNA, 55 nt, Homo sapiens
ccuuggcacuuugccacagugcccgguggauggagcgguguggggugugccaagg

SEQ ID NO: 399092 - RNA, 61 nt, Homo sapiens
ucaccaacacuuguuuccuuccaucuuuuugaucaaugacauauuagcagguguuagguga

SEQ ID NO: 399093 - RNA, 77 nt, Homo sapiens
aggcauaaacaugugugcuugauguaaaaaguauaguuaaaaaguuacuuuaggccaggcacaguggcucaaugccu

SEQ ID NO: 399094 - RNA, 62 nt, Homo sapiens
uccuagcugcauccugugcacucaaggucccuaaggaaauugacggggaagugaggcugggg

SEQ ID NO: 399095 - RNA, 130 nt, Homo sapiens
uccgcgccuccuuucccacggccacgcccuccagagcgcucauuggucagacgcgucgguguugagcgcucgcgccgacgucagccaaugggaggccggagugggaagaaggcggggaagggggggcggg

SEQ ID NO: 399096 - RNA, 61 nt, Homo sapiens
guguugcuguauucaugucuguauuuccaaugcuuggcauauaguagaugugcaguaacau

SEQ ID NO: 399097 - RNA, 56 nt, Homo sapiens
ugaggcggugugaugucacaugcuggaauuuucaggauguagaaauacccguuuca

SEQ ID NO: 399098 - RNA, 69 nt, Homo sapiens
guaagcuaggguuaauuuauuauugaagaaaaaauauuuuuaaauaaauugaguguagccuuaguguac

SEQ ID NO: 399099 - RNA, 66 nt, Homo sapiens
gcacccaguaagcaugaggcccugggcgcagcacgccuucaggagcugguagucucauugggaugu

SEQ ID NO: 399100 - RNA, 74 nt, Homo sapiens
ugggcuugauauucagucagcuaaguaaauggauggagccaccuucaguugcaucaguugaccaguuaagucua

SEQ ID NO: 399101 - RNA, 95 nt, Homo sapiens
guugcagagaucuuugacgugucuccucaguaggccuuuuguagcucuagcucagaucaugcuuaugaugggacaacaucacuugguccugcaau

SEQ ID NO: 399102 - RNA, 130 nt, Homo sapiens
caaacuucuuuuccugacuuugaccuauccagcccuccaggacuccauuuauuucauuuguucuccaagccgauuuaccaugaagagaaaguggaucuuggauugcucuuuccacugcaggaagaaacug

SEQ ID NO: 399103 - RNA, 69 nt, Homo sapiens
cacuugaaccuaggaggcagagguugcagugagccgagauugugccacuccaaccugggugacagagug

SEQ ID NO: 399104 - RNA, 58 nt, Homo sapiens
uuuccaguuggaagaagggggaugaauagaauauucauccucuucucucagcuagaaa

SEQ ID NO: 399105 - RNA, 63 nt, Homo sapiens
cuuagaguaccugcuauuuaaaaaaaucauccaagaauuugaaauuuaaggcaggacuuuaag

SEQ ID NO: 399106 - RNA, 87 nt, Homo sapiens
gucacuaugcaaagcacuuggcuuggaagaucucauuuaauccucacaagaaucuccagaaauaaguauuuuuagcacauaggugac

SEQ ID NO: 399107 - RNA, 65 nt, Homo sapiens
guuuuaucugguuauugcugcugauuauaccaacuguaaaauuaaggcaaagacucagacaagau

SEQ ID NO: 399108 - RNA, 58 nt, Homo sapiens
acucuacugucuuacagauaucaguuuuucuuccacaugucaacauagacaguagagu

SEQ ID NO: 399109 - RNA, 66 nt, Homo sapiens
acuuagagugcuuuauuagauguagcuuggagauuauagggugccacuaaagaaccacucccaagu

SEQ ID NO: 399110 - RNA, 57 nt, Homo sapiens
aaugaguagugcugauggcacuggcacauuacaguggugucuuguuuaauacucauu

SEQ ID NO: 399111 - RNA, 101 nt, Homo sapiens
aagcaacaugaagcccaaggagcuuaagugacuuguacaaagaaccccgcuaauuagcaguacaguucgugcuagagccuuuggugcugucagcauugcuu

SEQ ID NO: 399112 - RNA, 73 nt, Homo sapiens
aggcuggagugcaauggcgcgaucucggaucacugcaagcuccgccuccgggguucaugccauucuccugccu

SEQ ID NO: 399113 - RNA, 62 nt, Homo sapiens
ggugaauuguaccccauaggaucaucaauaagccacuuagauccacaauagggaaauucacc

SEQ ID NO: 399114 - RNA, 61 nt, Homo sapiens
gagaaugaugauuuccaauuucauccgugucccugcaaaggacaugaacucaucaguucuu

SEQ ID NO: 399115 - RNA, 69 nt, Homo sapiens
cuucuugagggccugcugggaaguggagguagcccagaacugacaggcccagguucggcccucaaggag

SEQ ID NO: 399116 - RNA, 87 nt, Homo sapiens
guuugauacucacagagagcuugcccuuguauauuccaugucaauaaaccgaauauacaaagggcaaccucgcuuuaaguaccaaac

SEQ ID NO: 399117 - RNA, 56 nt, Homo sapiens
ccccaagacuaguaauguugugacucuguagagguaucaccuugguagucuugggg

SEQ ID NO: 399118 - RNA, 73 nt, Homo sapiens
guggccagagcuguagcauguagcuaccuuuagcugaagguagcugcaaaauauagacuucuaguugggccac

SEQ ID NO: 399119 - RNA, 81 nt, Homo sapiens
augcuuuaaaauuuguguaucuuucuagggcaaaagagggugugcuucuguccuggugaugcccaaauucuaugauagcau

SEQ ID NO: 399120 - RNA, 72 nt, Homo sapiens
agacuuuuugauguaggcauucaaggcuaugaacuuucuucuuagcacugcuuuugcugcaucccagaguuu

SEQ ID NO: 399121 - RNA, 128 nt, Homo sapiens
agcuccucugaaacaagguggaaucaugggguuucagcguggggugcugaagacuugcacuaugcagcucuccucacaugccacauugagucccagauuucugcaaccacagaaguuuaagagaagcu

SEQ ID NO: 399122 - RNA, 72 nt, Homo sapiens
caaccacuguuuaaauggcugaggaugucagaucuagcccuugcucuuugccaaaauuugcugcagugguug

SEQ ID NO: 399123 - RNA, 66 nt, Homo sapiens
gcugcagaucuucgcgguaaguguuacagcucauaaaagcagcguggacccagagugaucaguagc

SEQ ID NO: 399124 - RNA, 65 nt, Homo sapiens
cccagauguuuuauuaauuauacuccuuuucaugacucaggaaggcuaagaugaagcugucuggg

SEQ ID NO: 399125 - RNA, 111 nt, Homo sapiens
gaggugggguuuuuuuguuuguuuuugcuuuguuuugagacagagucuugcucuguugcccaggcuggagugcaauggcacgaucucgucucacugcaagcucuccgccuc

SEQ ID NO: 399126 - RNA, 75 nt, Homo sapiens
aggcugaggauuuggcagugaagggaucacagauccaugaagguguggucuccccagugccagcucucugggccu

SEQ ID NO: 399127 - RNA, 85 nt, Homo sapiens
gguuaacgagugauuaaaucaggaaaaaaaauguacagauuuugacuuugaguccaguacucuuuccugaaaaucaaguuaagcc

SEQ ID NO: 399128 - RNA, 109 nt, Homo sapiens
gacauuugcuccccuauggagaaaccaggauaacagggcuguggguauggaccagaggccugggggaaguacucaguagucuguugcugucuccacugaagcagauguu

SEQ ID NO: 399129 - RNA, 79 nt, Homo sapiens
uggaaucaaauugucaaugaacggaauugaauggaaucauagaacggaauccaauguaaucaucauugaauugaaccca

SEQ ID NO: 399130 - RNA, 105 nt, Homo sapiens
uuugcagcugagaaucuggaauucguggaaguuaagugacuuucugaguguggauuugaacuuugaauuauuugauuccagagcccagguucucagaagugcaaa

SEQ ID NO: 399131 - RNA, 89 nt, Homo sapiens
ggaguuuugcucuuguugccuaggcuggagugcaguggcacaaucuuggcucacugcaaccuccaccucccggguucaagugauuaucc

SEQ ID NO: 399132 - RNA, 77 nt, Homo sapiens
uuuguuaucugguugucugauuacuuacauaauuucaugcggaauuuaagaugguggucagaaaucucaguggcaaa

SEQ ID NO: 399133 - RNA, 55 nt, Homo sapiens
ccaaguguucucauuguucaauucccaccuaugagugagaacaugcagcauuugg

SEQ ID NO: 399134 - RNA, 66 nt, Homo sapiens
uuagagaaaagcuugcuugcuugaguauaauuauuguuuugccugaguuuguaaacuauucacuaa

SEQ ID NO: 399135 - RNA, 69 nt, Homo sapiens
uguuguaaauggcucuuauuauuuugagguauguuccaucaauaccaaguuuauugagaguuuuuaaca

SEQ ID NO: 399136 - RNA, 67 nt, Homo sapiens
gggguauuugagguaucuaucacucaaacauuuaucauuucgauguguuagguacauucaagucucc

SEQ ID NO: 399137 - RNA, 70 nt, Homo sapiens
guuguugagauggaguuucgcucuuucgcccaggcuggagugaaguggcgugaucucugcucauugcaac

SEQ ID NO: 399138 - RNA, 73 nt, Homo sapiens
cggcuuuuauuacguugagauacauuccuucuauacccaguuucuugaggguuuuuaucauguagggaaguug

SEQ ID NO: 399139 - RNA, 62 nt, Homo sapiens
aggguugaucuauguugcuggcaguuuggguguucagagugacagaaauuuagaucaaccuu

SEQ ID NO: 399140 - RNA, 70 nt, Homo sapiens
gaaugcagcuacagguuauccccacauauugacaaauaauauuggucuucaagaccugugaacuucauuc

SEQ ID NO: 399141 - RNA, 58 nt, Homo sapiens
auaucacaggaaaggaagauacacagauaaauuuuggauuuaucuuuuccagugguau

SEQ ID NO: 399142 - RNA, 67 nt, Homo sapiens
gauaaaucuuaucuuuguuacuuguuuauggcuggaagcggaaauaagucacacagauuaauuuauu

SEQ ID NO: 399143 - RNA, 62 nt, Homo sapiens
uugugaauggugccgcgauaaacauacgugugcauauguguuuauagcagcaugauuuauaa

SEQ ID NO: 399144 - RNA, 71 nt, Homo sapiens
uauggcugugacuuaucuuguucuuccaaaauguuagacacaaguccauauaagucuguuucacugccaua

SEQ ID NO: 399145 - RNA, 62 nt, Homo sapiens
ugagauuuggguggggacacagccaaaccauaucauuccaacucuggccccucuaaaucuca

SEQ ID NO: 399146 - RNA, 87 nt, Homo sapiens
uuggcccagcuuggcucaugugaccaucucuccacuaaucauggaaccucugauuggccagaccauggucaggugucccacagucag

SEQ ID NO: 399147 - RNA, 68 nt, Homo sapiens
gccauucugaggucuuuauuuagugcucaggucauaugaaugggcuguauagaggggacuggaugggc

SEQ ID NO: 399148 - RNA, 56 nt, Homo sapiens
ucaaaguauucuucugagaaccuucuugguaaaaggcucucagaaugaaauuuuga

SEQ ID NO: 399149 - RNA, 68 nt, Homo sapiens
gacucaguguggugggcauuugggugggacaauuccacuuuguacaagacuguccaacauauuggguu

SEQ ID NO: 399150 - RNA, 77 nt, Homo sapiens
ucacuugaacccaguagguggagguugcagugagccaagaucacgccauugcacuccagccuaggcaacaagaauga

SEQ ID NO: 399151 - RNA, 62 nt, Homo sapiens
gcuaguuaguggcagagccggucagugugaugccacuuugguugugcucuccacuuugaggc

SEQ ID NO: 399152 - RNA, 75 nt, Homo sapiens
auaaccgaauucugucacuuaggaggucauaaaaucagacacagacaugugacacugaauggcagaacuaguuau

SEQ ID NO: 399153 - RNA, 72 nt, Homo sapiens
acuugagccugggaggcggagguuguagugagcuaagaucgcacuauugcacucuaaccuaggugacagagu

SEQ ID NO: 399154 - RNA, 129 nt, Homo sapiens
ugcuugaaaagaccacgcucgagggaaagacucagaaaucucacaaacuggaagaaguuuaauggcauccauagaugccaagaacauuuucuguuuugcaguucauuccugguaaguaaaauauuuuua

SEQ ID NO: 399155 - RNA, 82 nt, Homo sapiens
gggggaagaggcauugaagauauggaagucugauucuuuuaccaucuacucagagcuuuuucacuucucugugcccaccccc

SEQ ID NO: 399156 - RNA, 61 nt, Homo sapiens
uauuccugaauuguguguguugauauguuguuacaggucuuugcauguauguucaugaaua

SEQ ID NO: 399157 - RNA, 84 nt, Homo sapiens
uucgauuuuacaggcucacagucagaagggacuugccuugucuuggauaagacuuuggacugugaacuuuugauuuaaugcgga

SEQ ID NO: 399158 - RNA, 85 nt, Homo sapiens
cuaaaggggauuuuugguggaauuuuuaguuuucuauguauauguugccugagaacagagauaauuuuacuuccuuccucuuugg

SEQ ID NO: 399159 - RNA, 88 nt, Homo sapiens
gaguaaacaaagugcaugacugauauuugagauacuucaugccuuaucucuggauaucuacuuauguucuauuuucauuuguuuguuu

SEQ ID NO: 399160 - RNA, 67 nt, Homo sapiens
ccaaaguauuuucacugauaucuuguuucuaguuuuuaucacaggauaguaggaauuuuacuauugg

SEQ ID NO: 399161 - RNA, 69 nt, Homo sapiens
ugcggugggugcgggaggcgcgccuaggugccgaaacccggucugugcugccauccuguggccauugca

SEQ ID NO: 399162 - RNA, 97 nt, Homo sapiens
cagggguaugcuccuccacuuugacuagaguguuuuacaacucuguagaggugaaaguuaacuuguagcaaacugggagugaugcaacuuacuccug

SEQ ID NO: 399163 - RNA, 58 nt, Homo sapiens
aauguaugagaguuccagcugauguguagccuaaccaguacugauauucucauauauu

SEQ ID NO: 399164 - RNA, 89 nt, Homo sapiens
auuguguuuuaaaauuggcauugaguuucaaaucauaaugcauaaacugccaaugguaugacacucauuguuuauuuuaaagucaugau

SEQ ID NO: 399165 - RNA, 68 nt, Homo sapiens
ucaaaucaguggauuuaaccugaaucaucaguaucaccucuggugauuuuauuuaauuaacugauuga

SEQ ID NO: 399166 - RNA, 67 nt, Homo sapiens
acucacauauguguauucucauuuacauaagauaauucaagaaaugaguagguccacguaugugagu

SEQ ID NO: 399167 - RNA, 82 nt, Homo sapiens
uucaaguccuaguagaaucccuugcaaugucccuccucccuggaaggcaagaggagauucugcucccagaacaggccuugga

SEQ ID NO: 399168 - RNA, 86 nt, Homo sapiens
cuuuauuucuggcuuugccuuugugauauggucuaucagaugauugauaaaaucuaucuagaguaaggauauaagacaaaauaaag

SEQ ID NO: 399169 - RNA, 76 nt, Homo sapiens
uaauccauaguauauuaguacucacugugugagguacuggguaauuacugaguaaaucacugaguaucuacgauua

SEQ ID NO: 399170 - RNA, 101 nt, Homo sapiens
ugaggcaggagaauuguuugaaccuggaaggcggagguugcaguaagccaggauugugcuacugcacuccagccugggagacagagcaagauccugucuca

SEQ ID NO: 399171 - RNA, 55 nt, Homo sapiens
caaggggagcucuagccuucauaauuauuuuaauugaauacugcugcucccuuug

SEQ ID NO: 399172 - RNA, 58 nt, Homo sapiens
uuuuggcacuuugucugauucucuuccuucauccugaaaguuagcacacgugucaaaa

SEQ ID NO: 399173 - RNA, 66 nt, Homo sapiens
gacaucaguccuaugauaaccauuuaccuuugagauaauuguaccuguuuuaaugggauugauguu

SEQ ID NO: 399174 - RNA, 75 nt, Human adenovirus A
uuuagcaguugcugacgauaacguucaugccgacuauguuuuagagggcgaacaguguuuucagcaauuacuuga

SEQ ID NO: 399175 - RNA, 55 nt, Human adenovirus A
agcguucaauaguugccacgcuuugaccggucaggcgugcgcagucuugaaugcu

SEQ ID NO: 399176 - RNA, 62 nt, Human adenovirus B (HAdV-B)
ccgguguguguagaugugacugaagaucucagaccggaucauuugguuauugcccgcacugg

SEQ ID NO: 399177 - RNA, 55 nt, Human adenovirus B (HAdV-B)
cugguggaaugugaaacuguuugcgccuccugcggcgcagaugcauacuccccag

SEQ ID NO: 399178 - RNA, 59 nt, Human adenovirus B (HAdV-B)
uggaauggguuacuauggaagcaucauggcuaauuccacuuccucuaauaacccuucua

SEQ ID NO: 399179 - RNA, 79 nt, Human adenovirus B (HAdV-B)
cccuaaacugacguaaugggaguaaaguguaaaaaaucccgccaaacccaacacacaccccgaaacugcgucaccaggg

SEQ ID NO: 399180 - RNA, 76 nt, Human adenovirus C
agcuccugcagguuuaccucgcauagccgggucagggcgcgggcuagguccaggugauaccugauuuccaggggcu

SEQ ID NO: 399181 - RNA, 61 nt, Human adenovirus C
ucccauuuaaacuuuggagaaaguuugcagcuaaaaggcggcugagauaccagaguuggga

SEQ ID NO: 399182 - RNA, 75 nt, Human adenovirus C
uuugacaucccauuuaaacuuuggagaaaguuugcagcuaaaaggcggcugagauaccagaguugggaggaagga

SEQ ID NO: 399183 - RNA, 89 nt, Human adenovirus C
gguggauaaauucgcaaggguaucauggcggacgaccgggguucgaaccccggauccggccguccgccgugauccaugcgguuaccgcc

SEQ ID NO: 399184 - RNA, 55 nt, Human adenovirus C
gaucaugucuaccugcggggcgaugaagaaaaccguuuccgggguaggggagauc

SEQ ID NO: 399185 - RNA, 82 nt, Human adenovirus C
cgggcgcaggguccucgucagcguagucugggucacggugaaggggugcgcuccgggcugcgcgcuggccagggugcgcuug

SEQ ID NO: 399186 - RNA, 61 nt, Human adenovirus C
gugagugcgcccauggacauaaaguuacuggagaaugggaugcgccaaagggugcgaucgc

SEQ ID NO: 399187 - RNA, 70 nt, Human adenovirus C
gcgcucgaucaucuccccgcggcgacggcgcauggucucggugacggcgcggccguucucgcgggggcgc

SEQ ID NO: 399188 - RNA, 98 nt, Human adenovirus C
uucugcagacuaacuuugccugggaggagccccacagaaaccuccaaaaccaagagguacuguuagagcucuguuccagcaaguuacgcacagcagaa

SEQ ID NO: 399189 - RNA, 56 nt, Human adenovirus C
ggcugugcaucagcucgcggucgcugagcucgcgccgccggcucacgcucacggcc

SEQ ID NO: 399190 - RNA, 74 nt, Human adenovirus C
gcccgguuccauguugcgcgcggucauguccagcgccacgcugggcguuaccccgucgcgcaucagguuaaggc

SEQ ID NO: 399191 - RNA, 107 nt, Human adenovirus C
gacccacgaugcuguucagugugcuuugccaguugccacuggcuacgggccgcaucgaucgcggaccgcuggcggcacggcgcagggacgcgcggcuagggcggguu

SEQ ID NO: 399192 - RNA, 63 nt, Human adenovirus C
uuucggccagcgcguuuacgaucgccagcaccuucucgugcgugggguuugcgcgcgccggga

SEQ ID NO: 399193 - RNA, 78 nt, Human adenovirus C
gggcccuggcuggcacgggcagcggcgauagagaggccgaguccuacuuugacgcgggcgcugaccugcgcugggccc

SEQ ID NO: 399194 - RNA, 55 nt, Human adenovirus C
cuccccuggacccgccguuugugccuccgcgguaccugcggccuaccggggggag

SEQ ID NO: 399195 - RNA, 125 nt, Human adenovirus C
ccucguuccagacgcggcuguagaccacgcccccuucggcaucgcgggcgcgcaugaccaccugcgcgagauugagcuccacgugccgggcgaagacggcguaguuucgcaggcgcugaaagagg

SEQ ID NO: 399196 - RNA, 56 nt, Human adenovirus C
ugcaaaauuuccaacguggagcucugcaaccuggucuccuaccuuggaauuuugca

SEQ ID NO: 399197 - RNA, 87 nt, Human adenovirus C
guggauaaauucgcaaggguaucauggcggacgaccgggguucgaaccccggauccggccguccgccgugauccaugcgguuaccgc

SEQ ID NO: 399198 - RNA, 67 nt, Human adenovirus C
guuuucggccagcgcguuuacgaucgccagcaccuucucgugcgugggguuugcgcgcgccgggacc

SEQ ID NO: 399199 - RNA, 62 nt, Human adenovirus C
ccuccugcuguugcuccuccgucgguauuauugccgggcggacggaagacaacaguagcagg

SEQ ID NO: 399200 - RNA, 59 nt, Human adenovirus C
ggaugcuguuucuccccccgguaggccgcagguaccgcggaggcacaaacggcgggucc

SEQ ID NO: 399201 - RNA, 64 nt, Human adenovirus C
ccccgcggcgccgggcccggcacuaccuggacuuggaggagggcgagggccuggcgcggcuagg

SEQ ID NO: 399202 - RNA, 75 nt, Human adenovirus C
uauaaggauggacauguuugcucaaaaagugcggcucgauaggacgcgcggcgagacuaugcccagggccuugua

SEQ ID NO: 399203 - RNA, 73 nt, Human adenovirus C
cagaccccccaucuauaggccuaucauugugcucaacccacacaaugaaaaaauucauagauuggacggucug

SEQ ID NO: 399204 - RNA, 60 nt, Human adenovirus C
gagcggugcggggugcauagguugcagcgacagugacacuccaguaggccgucaccgcuc

SEQ ID NO: 399205 - RNA, 70 nt, Human adenovirus C
ggcucggagcaggucuacuggucguugccagacaugaugcaagaccccgugaccuuccgcuccacgagcc

SEQ ID NO: 399206 - RNA, 125 nt, Human adenovirus C
ccucuuucagcgccugcgaaacuacgccgucuucgcccggcacguggagcucaaucucgcgcagguggucaugcgcgcccgcgaugccgaagggggcguggucuacagccgcgucuggaacgagg

SEQ ID NO: 399207 - RNA, 104 nt, Human adenovirus C
uuggcacaauuggauucuuugacccgggaacuuaaugucguuucucagcagcuguuggaucugcgccagcagguuucugcccugaaggcuuccuccccucccaa

SEQ ID NO: 399208 - RNA, 82 nt, Human adenovirus C
ggauucuuugacccgggaacuuaaugucguuucucagcagcuguuggaucugcgccagcagguuucugcccugaaggcuucc

SEQ ID NO: 399209 - RNA, 64 nt, Human adenovirus C
cguagucguugcaaguccgcaccagguacugauaucccaccaaaaagugcggcggcggcuggcg

SEQ ID NO: 399210 - RNA, 95 nt, Human adenovirus D
gguaccuucgagcugcaagguccgcaggaguccaccgcuccgcugaaacucacgccgggguuguggacuuccgcguaccugcgcaaauuuguacc

SEQ ID NO: 399211 - RNA, 65 nt, Human adenovirus D
gcgucugcagcauugucugccuggucaucaccuuccugcagcucaucgacuggugcugcgcgcgc

SEQ ID NO: 399212 - RNA, 76 nt, Human adenovirus D
gcagauuuacagcuucgaguacgaggccaugcugcgccgaagcgccguggccucuucgcccgaccgcugucucagc

SEQ ID NO: 399213 - RNA, 56 nt, Human adenovirus D
ugagaggagugugauaugcacaguagucaucaaaugcgagcauacaugcccucuca

SEQ ID NO: 399214 - RNA, 78 nt, Human adenovirus D
ggcuaccugggaggagaggaggaugugcugcugaaacaccugcagcgccagucccucauccuccgggacgcccuggcc

SEQ ID NO: 399215 - RNA, 69 nt, Human adenovirus E
ucuugcugcccggcugcgggguggacuucaccgagagccgccucagcaaccugcugggcauucgcaaga

SEQ ID NO: 399216 - RNA, 84 nt, Human adenovirus F
cgagguagugagcucuuccaccgguccuagaccugacggagucuuucagcuuggaggcgccgggcggucuuccuucacuccucg

SEQ ID NO: 399217 - RNA, 64 nt, Human adenovirus F
agcccaccuguaccgggucuuggaaaacauccauaaaguuuuaaacgaccgcgacagguggucu

SEQ ID NO: 399218 - RNA, 70 nt, Human adenovirus F
uugucgcccacggccagcguaaagcgcacuuuguaagaguaggcgguuuccucgcggucgacgggcacga

SEQ ID NO: 399219 - RNA, 115 nt, Human adenovirus F
aacagugccucggcguccuccagcgugcgcugcaguuggucuucacuucugugauacaagcagcugcgggugagcgaacggagugaucgguuuuuuacuuugaguuccagcuguu

SEQ ID NO: 399220 - RNA, 56 nt, Human adenovirus F
gcgugcgcugcaguuggucuucacuucugugauacaagcagcugcggagcauuugc

SEQ ID NO: 399221 - RNA, 58 nt, Human adenovirus F
ugcagagccaccggaggcuggcggcuauuuuccagccgcugauugauuugguuuugca

SEQ ID NO: 399222 - RNA, 57 nt, Human adenovirus F
gucgcccucuucugcaccugcacgcucuugcuguggguggaugauggagggaacgac

SEQ ID NO: 399223 - RNA, 79 nt, Human adenovirus F
ccgaguaacguaugcuguuccgcccuuccguaggccccagguaacggggagggacguggagcgccugcagcguugccgg

SEQ ID NO: 399224 - RNA, 64 nt, Human adenovirus F
uauugcggagccugagggucgcuggcuuuuggaccugguuaauauccuucagagcauuguggua

SEQ ID NO: 399225 - RNA, 72 nt, Human adenovirus F
uccaagcccaccuguaccgggucuuggaaaacauccauaaaguuuuaaacgaccgcgacagguggucuaggg

SEQ ID NO: 399226 - RNA, 73 nt, Human adenovirus F
gguguuuucuccaaacguuucguaggggcuguagagaugacgguaauaguagaggacguugcgaggaaccgcc

SEQ ID NO: 399227 - RNA, 64 nt, Human astrovirus
ggacagguuugacaucauagacacuucugaugaagaagaugaaaaugagacagaccguguaacc

SEQ ID NO: 399228 - RNA, 73 nt, Human coronavirus 229E
uguagguucuagcuuugaugguguuauguauggugguuuugaagaccaaccuaaucuucaaguugaaucugca

SEQ ID NO: 399229 - RNA, 66 nt, Human coronavirus OC43 (HCoV-OC43)
uuugauacuuuuaauuuccuuaccaacggcuuuugcuguuauaggagauuuaaaguguacuucaga

SEQ ID NO: 399230 - RNA, 56 nt, Human coronavirus OC43 (HCoV-OC43)
aucuacuugguacugcuaagaaacaaguuguucuuguuagcaauaaucaagaggau

SEQ ID NO: 399231 - RNA, 59 nt, Human coronavirus OC43 (HCoV-OC43)
uaucguaccacuuuguauuuuuaacggcaaguuuuugucgaauacaaaguauuaugaug

SEQ ID NO: 399232 - RNA, 69 nt, Human coronavirus OC43 (HCoV-OC43)
uugugaagaccauaagccacaauauucauucaaguugguaaugaauggucugguuuuuggucuauauaa

SEQ ID NO: 399233 - RNA, 57 nt, Human herpesvirus 1
ucgucgucagcaccgucauccacaccuuaucguuuuuguguauuggugcgauggcga

SEQ ID NO: 399234 - RNA, 69 nt, Human herpesvirus 1
cgugccugcugcgccuggccgaccagaagggcuuuauucugccggacacccaggggcgauuuaggggcg

SEQ ID NO: 399235 - RNA, 64 nt, Human herpesvirus 1
gcgcgugguccccggggacguggcgcuggaccaggccugcuuccggaucucgggcgccgcgcgc

SEQ ID NO: 399236 - RNA, 68 nt, Human herpesvirus 1
cggaguugacaaugcgcgcgauagagucgacguccguccccaggucgucgacucuaucgcgcgugccg

SEQ ID NO: 399237 - RNA, 79 nt, Human herpesvirus 1
agaacacgcgguccccugugguguuuuugguuauuuuuauuaaaucucgucgacaaacagggggaaaggggcguggucu

SEQ ID NO: 399238 - RNA, 69 nt, Human herpesvirus 1
gcugacgcccucccggugcagcugcagggucugguccuuguaaaucucggcucggaggugcgucucggc

SEQ ID NO: 399239 - RNA, 88 nt, Human herpesvirus 1
acgaccgggguggucagcacgcggcccccuagaaacucggcauacagggcgucgaugagaugggcugcgcugggcgccacugcgucgu

SEQ ID NO: 399240 - RNA, 91 nt, Human herpesvirus 1
gauggcccuccaggcugucgacgcccccucccuguuugucgccuggcuggccgcucgguggcuccggggggcuuccggccugggggccguc

SEQ ID NO: 399241 - RNA, 71 nt, Human herpesvirus 1
gccucggccacgggccgcagcggcaccgugcuggcggcggcgggggccguggaggugcugggggcggaggc

SEQ ID NO: 399242 - RNA, 70 nt, Human herpesvirus 1
gccggacgccccgcgcccccccacgcagaggcgccgccgcgccccccgugacgggcggggcgucucacgc

SEQ ID NO: 399243 - RNA, 63 nt, Human herpesvirus 1
ggcagccuucgcucuccauccugcaucagggccggggcuucggggugaaugagcugggcggcc

SEQ ID NO: 399244 - RNA, 92 nt, Human herpesvirus 1
ggccggccgcguggccgucgagugccuggccgccugccgcgggauccuggaggcgcuggccgagggcuucgacggcgaccuggcggccgucc

SEQ ID NO: 399245 - RNA, 55 nt, Human herpesvirus 1
gugugcacggaugagaucgcgccccaccugcgcugcgacaccuucccgugcaugc

SEQ ID NO: 399246 - RNA, 60 nt, Human herpesvirus 1
gucacccuggaguugcugcuagaguacgcguggcgcgagggcgagcggcuccugggcagc

SEQ ID NO: 399247 - RNA, 81 nt, Human herpesvirus 1
guaaagcggcagccuucgcucuccauccugcaucagggccggggcuucggggugaaugagcugggcggccucccgcgugac

SEQ ID NO: 399248 - RNA, 69 nt, Human herpesvirus 1
gggucgcucgguauucgaggccacacgcgucaccuuaauaugcgaaguggaccugggaccgcgccgccc

SEQ ID NO: 399249 - RNA, 125 nt, Human herpesvirus 1
gugggaauguagcaggcgcuaauauccaacacaauaucacagcccaucaacaggaggucaguguccgugguguacacguacgcgaccguguuggugugauagagguuggcgcaggcaucguccgc

SEQ ID NO: 399250 - RNA, 101 nt, Human herpesvirus 1
aacgucugccuggagacgcaucgggccagauucacgcuucccagguugcagaccccacuggaucgcuuggaggccggauggacgaucucggugcagagguu

SEQ ID NO: 399251 - RNA, 108 nt, Human herpesvirus 1
ggucgcgucggcguccagcucgacccgccggggcugcccggccgugaagcggcccguggcgucgcggccggccaccgccgcgcgggcccggcggcgcucgaugcggcc

SEQ ID NO: 399252 - RNA, 58 nt, Human herpesvirus 1
cuggccgucguagauggugcgggugauguuaauacccgccaagcgcgcgacggccgag

SEQ ID NO: 399253 - RNA, 56 nt, Human herpesvirus 1
cgacccgacgcgggaccgccagagacagaccgucagacgcucgccgcgccgggacg

SEQ ID NO: 399254 - RNA, 75 nt, Human herpesvirus 1
cgucucuccggagagcggcuuggugcggagcucccgggagcuccgcggaagacccaggccgccucggguguaacg

SEQ ID NO: 399255 - RNA, 66 nt, Human herpesvirus 1
guccguggccccacggucagucugguaucaaacucauuuguggacgccggggccuuggggcccgac

SEQ ID NO: 399256 - RNA, 59 nt, Human herpesvirus 1
guucggacggcaggcacacguaacgcacgcuagggugugugcgucgcccgcgucuggac

SEQ ID NO: 399257 - RNA, 70 nt, Human herpesvirus 1
gcccggcucgcgccgugcugacaaacgccuugcuguugggcgucuuccugugcacggccgacgccgcggu

SEQ ID NO: 399258 - RNA, 105 nt, Human herpesvirus 1
uccgccacccugcgggcgacccggggggugcucugauagucucgcgugcccaaggcccgugaucgggguacuucgccgccgcgacccgccacccggugugcgcga

SEQ ID NO: 399259 - RNA, 63 nt, Human herpesvirus 1
cgcggcguccggguggcggucgagggaaauagcagccaggacucggccgucgccaucgccacg

SEQ ID NO: 399260 - RNA, 65 nt, Human herpesvirus 1
gcaagacgaucguccacggcguccaggcgcucaccaagcgccggaucgagguaccgucggugugc

SEQ ID NO: 399261 - RNA, 68 nt, Human herpesvirus 1
ggcgcccggcgcgccggacuucugcgaggaggaggcccacucgcacgccgccugcgcgcgcuggggcc

SEQ ID NO: 399262 - RNA, 89 nt, Human herpesvirus 1
gccgugugccccagucgcacucgucccuggcucaggccgcgaaccaagaacagagucugugccgggcgcgugcgacgguggcgcgcggc

SEQ ID NO: 399263 - RNA, 80 nt, Human herpesvirus 1
cccggcggacaugcugggccuaccguggacuccauuuccgagacgacguggggggagcggugguugagcgcgccgccggg

SEQ ID NO: 399264 - RNA, 56 nt, Human herpesvirus 1
cgccgccgucgcgcccgccccgcggggucuuacccuggcuggcuucgaaggccgug

SEQ ID NO: 399265 - RNA, 130 nt, Human herpesvirus 1
gggcguggccgcuauuauaaaaaaagugagaacgcgaagcguucgcacuuuguccuaauaauauauauauuauuaggacaaagugcgaacgcuucgcguucucacuuuuuuuauaauagcggccacgccc

SEQ ID NO: 399266 - RNA, 59 nt, Human herpesvirus 1
ggcagggcguuguucuggucaaggagggucauuacguugacgacaacaacgcccauguu

SEQ ID NO: 399267 - RNA, 66 nt, Human herpesvirus 1
ggcuguccgucggcgccugggaucggauaaauccgaucucgaucucgaccgccuggcggaacagcc

SEQ ID NO: 399268 - RNA, 95 nt, Human herpesvirus 1
ggcgcgggcgccaagcgggccaccgucagcgaguucgugcaagucaaacacauugaccgcgugggccccgcuggcguuucgccggcgccuccgcc

SEQ ID NO: 399269 - RNA, 82 nt, Human herpesvirus 1
cgggggaugguaaggcgucgcggcguccuggaucgacgguaugugccaguuuggugggauuugcggcgccaccguccccacg

SEQ ID NO: 399270 - RNA, 82 nt, Human herpesvirus 1
cucgcgggcccacgagccgcggcgcgccaggcgggcggccgaggcccagaccaccagguggcgcacccggacguggggcgag

SEQ ID NO: 399271 - RNA, 81 nt, Human herpesvirus 1
ggcaggaggaaggaggaggccgucccgccggagacaaagccgucccggguguuuccucauggccccuuuuauaccccagcc

SEQ ID NO: 399272 - RNA, 67 nt, Human herpesvirus 1
gggagugagggucgcgucgucuaugcgcuggaggugcgccgagaacagcgucacccgauuacucacc

SEQ ID NO: 399273 - RNA, 91 nt, Human herpesvirus 1
ucucugggagcucgcgguacucuggguucccuagguucucgggguggucgcggaacccggggcucccggggaacacgcgguguccugggga

SEQ ID NO: 399274 - RNA, 76 nt, Human herpesvirus 1
cgcguaucggcgucccggcgcggcgagcgucugacggucugucucuggcggucccgcgucgggucguggauccgug

SEQ ID NO: 399275 - RNA, 77 nt, Human herpesvirus 1
ggggaugguaaggcgucgcggcguccuggaucgacgguaugugccaguuuggugggauuugcggcgccaccgucccc

SEQ ID NO: 399276 - RNA, 77 nt, Human herpesvirus 1
cggagcucgcggcacgcgcgauagagucgacgaccuggggacggacgucgacucuaucgcgcgcauugucaacuccg

SEQ ID NO: 399277 - RNA, 74 nt, Human herpesvirus 1
gcggagcgggcuggggcucgaggucgcucgguggggcgcgacgccgcagaacgcccucgagucgccguggccgc

SEQ ID NO: 399278 - RNA, 67 nt, Human herpesvirus 1
gacgcucaugcgccuccgggcgcgccauccaaaguucgccagcgccgcccgcggagccaucggcguc

SEQ ID NO: 399279 - RNA, 61 nt, Human herpesvirus 1
gagccgcguguuguucgcgggcgcgagcgccaacgcguccgaggccgccaaggcgcggguc

SEQ ID NO: 399280 - RNA, 65 nt, Human herpesvirus 1
ccagcggccggccggcgcuuagggggaggaugucgccgacgccccuuggccgccccggcugcagg

SEQ ID NO: 399281 - RNA, 115 nt, Human herpesvirus 1
guccguccagauucugcgggcauaggauaccauaauuuuauuggugggucguuuguucggggacaagcgcgcucgucugacguuugggcuacucgucccagaauuuggccaggac

SEQ ID NO: 399282 - RNA, 72 nt, Human herpesvirus 1
guuguccguggccccacggucagucugguaucaaacucauuuguggacgccggggccuuggggcccgacggc

SEQ ID NO: 399283 - RNA, 76 nt, Human herpesvirus 1
ggcggacguggugccucagcguaacgccuacuauagcguucugaauacguuucaggcccuccaccgcuccgaagcc

SEQ ID NO: 399284 - RNA, 70 nt, Human herpesvirus 1
ggcucauggccacggcggccgccgcgugcgccaggccccagccgaagcggccggccgccauggcguagcc

SEQ ID NO: 399285 - RNA, 63 nt, Human herpesvirus 1
ggucccgacgccaacccaggccgcggcggggagccgagcccgcauggggggugucccggggcc

SEQ ID NO: 399286 - RNA, 117 nt, Human herpesvirus 1
cgcuggggguccugguggcgucggcggcuccgaguucccccggcacgccuggggucgcggccgcgacccaggcggcgaacgggggcccugccacuccggcgccgcccgccccuggcg

SEQ ID NO: 399287 - RNA, 66 nt, Human herpesvirus 1
ggagcugugccgccagacacgcguuuucgaucggguucaggucggcgugcaggaggcggacggccc

SEQ ID NO: 399288 - RNA, 56 nt, Human herpesvirus 1
gccacggcggccgccgcgugcgccaggccccagccgaagcggccggccgccauggc

SEQ ID NO: 399289 - RNA, 89 nt, Human herpesvirus 1
cccagcuucaggcaggccgugugcaggcccugcaugccgauucccauggaccgcagguugucguugccgcgggugcacuggggcguggg

SEQ ID NO: 399290 - RNA, 72 nt, Human herpesvirus 1
cgcgacccggacgccgaucccgacuccccggaccuugacucuauguggucggcgucggugauccccaacgcg

SEQ ID NO: 399291 - RNA, 100 nt, Human herpesvirus 1
cccaggccggccgcguggccgucgagugccuggccgccugccgcgggauccuggaggcgcuggccgagggcuucgacggcgaccuggcggccgucccggg

SEQ ID NO: 399292 - RNA, 69 nt, Human herpesvirus 1
cgcucgcaaagucgcgucagguucggggccugggugcugggguccaggugccggccgccgugaaagacg

SEQ ID NO: 399293 - RNA, 82 nt, Human herpesvirus 1
ccguaugguguugcgcaggugcaugccccagguuccgccggacaccugcagcaaacggcaccacgugcgcggggccagacgg

SEQ ID NO: 399294 - RNA, 57 nt, Human herpesvirus 1
cccgcgcgucgacgggacccagguauccccccugccgggccugcggaggaccgcggg

SEQ ID NO: 399295 - RNA, 79 nt, Human herpesvirus 1
gggguguuccggacucaaccgccgaacccaggaacccgccgcuccugguguuuacgaacgaguuugacgcggaggcccc

SEQ ID NO: 399296 - RNA, 99 nt, Human herpesvirus 1
gcgccuuuuccagcagcacgugcagcaucuggucggccgugccgcgcucaaacgccccgaggacggccuggacguugcgagcgagcuguuggauggcgc

SEQ ID NO: 399297 - RNA, 55 nt, Human herpesvirus 1
agcguucgcacuucgucccaauauauauauauuauuagggcgaagugcgagcacu

SEQ ID NO: 399298 - RNA, 86 nt, Human herpesvirus 1
guuguaggguuguuuccggacgucuucggaggccccgcggacaaucuggggggccuccgacggugcguuuaggagcacgcugcggc

SEQ ID NO: 399299 - RNA, 89 nt, Human herpesvirus 1
cgaggcuguaguccccccaggccccuaggucgcgacggcucguaagcacgacgcggucggccgcggggcuuugcgggggggcguccucg

SEQ ID NO: 399300 - RNA, 105 nt, Human herpesvirus 1
gcaggcgcuaauauccaacacaauaucacagcccaucaacaggaggucaguguccgugguguacacguacgcgaccguguuggugugauagagguuggcgcaggc

SEQ ID NO: 399301 - RNA, 70 nt, Human herpesvirus 1
ggcggccgggggcccgcggcgcgucaggcgccauaggugccgaccgaguccgcgguccaccauacccgcc

SEQ ID NO: 399302 - RNA, 64 nt, Human herpesvirus 1
cucgucgagcguaccgacgggcggcacaccuaucacgugacuggccgucaggagcucggcgcag

SEQ ID NO: 399303 - RNA, 84 nt, Human herpesvirus 1
ugagucaguggggaccacgcccccaacacggcgaccccgguccuuguguguuuguugugggggcgugucucuguguaugaguca

SEQ ID NO: 399304 - RNA, 57 nt, Human herpesvirus 1
gaugugcgucgcguuguaccugcgggcgaagaugcgguccauggcgucgcgggcguc

SEQ ID NO: 399305 - RNA, 129 nt, Human herpesvirus 1
cucgaucucccggacgacgacgcccccgaagaggcggggcuggcggcuccgcgccuguccuuucuccccgcgggacacacgcgcagacugucgacggcccccccgaccgaugucagccugggggacgag

SEQ ID NO: 399306 - RNA, 60 nt, Human herpesvirus 1
cgacgcguucugcggcgcaggccucggucagggccguggccagcgccgaggacagcagcg

SEQ ID NO: 399307 - RNA, 79 nt, Human herpesvirus 1
ccccgaugauggucccgacgccaacccaggccgcggcggggagccgagcccgcauggggggugucccggggcccagggg

SEQ ID NO: 399308 - RNA, 129 nt, Human herpesvirus 1
gggcugaucgccugcgugcagcuggagcgcguccucgagacggccgccagcgcugcgauuuucgagcgccgcgggccgccgcucucccgggaggagcgccuguuguaccugaucaccaacuaccugccc

SEQ ID NO: 399309 - RNA, 77 nt, Human herpesvirus 1
acccagcuguuucccggccuggccgcccugugucuugacgcccaggcggggcggccggucgggucgacgcggcgggu

SEQ ID NO: 399310 - RNA, 60 nt, Human herpesvirus 1
gcgggccugucguguagauucgaaaccacggacgggugauugugucgcagggcggcccgc

SEQ ID NO: 399311 - RNA, 59 nt, Human herpesvirus 1
gccccgccgcuugaucauuaucaccccguugcggggguccggagaucaugcgcgggugu

SEQ ID NO: 399312 - RNA, 87 nt, Human herpesvirus 1
gcgccuugcguggggcucgggggcgagcugugcccgcgugauucuguuuaguuacgacgagcucgucccccccaacacgcgcuacgc

SEQ ID NO: 399313 - RNA, 94 nt, Human herpesvirus 1
ggcgggcggcgccggaguggcagggcccccguucgccgccugggucgcggccgcgaccccaggcgugccgggggaacucggagccgccgacgcc

SEQ ID NO: 399314 - RNA, 78 nt, Human herpesvirus 1
guggguguguaggcgaugcgggucccccgaguccgcgggaagggcguggguuuggcgcgcguaugcguauucgccaac

SEQ ID NO: 399315 - RNA, 65 nt, Human herpesvirus 1
ccgcaccgucccccgacgaccucuugcagacgguccgugaugcaaggacggcggggggccugcag

SEQ ID NO: 399316 - RNA, 67 nt, Human herpesvirus 1
ggucgucggcgggcugacgaucggaggcagcgcgcgcuacugguggaucggugggcccgccgcggcc

SEQ ID NO: 399317 - RNA, 56 nt, Human herpesvirus 1
gccauggcggccggccgcuucggcuggggccuggcgcacgcggcggccgccguggc

SEQ ID NO: 399318 - RNA, 129 nt, Human herpesvirus 1
guccaccuccugccacuuggucauggugcagaccgacgggcgcuuuggcacccagucccaggccacggugaacuugggggucgugagcagguuccggguggucggcgccguggcccgggccuugguggu

SEQ ID NO: 399319 - RNA, 106 nt, Human herpesvirus 1
ucgugaucgccacgcugaugcaccacggggugcucccggcggccccgggggacgucccccgggacgcgaguacccacguuaaccccgacggcguggcgcaccacga

SEQ ID NO: 399320 - RNA, 67 nt, Human herpesvirus 1
uccggucccgccgaacgcauacaugcccuauuaucucagggaguaugugacgcggcuggucaacggg

SEQ ID NO: 399321 - RNA, 69 nt, Human herpesvirus 1
ggccgccggggcgcccgaggccucgaaccggcgucgcgccuccuccgccucgggcgccccccagaggcc

SEQ ID NO: 399322 - RNA, 74 nt, Human herpesvirus 1
gcccacggcgucgcccugaacacggacuauuacuucucccaccuguugggggcggcgugcgugacauucaaggc

SEQ ID NO: 399323 - RNA, 81 nt, Human herpesvirus 1
gggcccgccaugcucacgcugcaggugcuggcccacaacauggccgaacgcacaacggcgcugcucugcucggcggcgccc

SEQ ID NO: 399324 - RNA, 83 nt, Human herpesvirus 1
cggucucgacgccgccaucgcgcccuuucgccaccugucgccggcgucucgcgagggggcgcggcgacuggccgccgaggccg

SEQ ID NO: 399325 - RNA, 84 nt, Human herpesvirus 1
ccgggggaugguaaggcgucgcggcguccuggaucgacgguaugugccaguuuggugggauuugcggcgccaccguccccacgg

SEQ ID NO: 399326 - RNA, 99 nt, Human herpesvirus 1
ggggcgggcggcgccggaguggcagggcccccguucgccgccugggucgcggccgcgaccccaggcgugccgggggaacucggagccgccgacgccacc

SEQ ID NO: 399327 - RNA, 88 nt, Human herpesvirus 1
ggagucgggcacggcgccagugcucgcacuucgcccuaauaauauauauauauugggacgaagugcgaacgcuucgcguucucacuuc

SEQ ID NO: 399328 - RNA, 70 nt, Human herpesvirus 1
gcccgggcaaguaugccccccuggcgagcccagaccccuucuccccacaacauggagcauacgcucgggc

SEQ ID NO: 399329 - RNA, 84 nt, Human herpesvirus 1
cgacccccgcguccacccggagguuccggaggcgccgcgcggacggcgcggggcccccgcuuccggaugcgaacgacccggucg

SEQ ID NO: 399330 - RNA, 79 nt, Human herpesvirus 1
aaacgcgggcguauuggucccaauggggucucggugggguaucgacagagugccagcccugggaccgaaccccgcguuu

SEQ ID NO: 399331 - RNA, 83 nt, Human herpesvirus 1
gcagacagacccaugguuuuuggauggccugggcauggaccgcauguacuggcgcgacacgaacaccgggcgucuguggcugc

SEQ ID NO: 399332 - RNA, 66 nt, Human herpesvirus 1
cuccccugcggcguugcgacauacaaaauacaccagggcguggaaguacucgcgagcgcggggggg

SEQ ID NO: 399333 - RNA, 64 nt, Human herpesvirus 1
ucggcgucccggcgcggcgagcgucugacggucugucucuggcggucccgcgucgggucgugga

SEQ ID NO: 399334 - RNA, 79 nt, Human herpesvirus 1
ggggugccgcuguggccucaccugaccaaccuuuacacgggggcccggaacgggaggccacagcgccgucuuucucccc

SEQ ID NO: 399335 - RNA, 109 nt, Human herpesvirus 1
gcggggucccgccguccccccagcgugcaggcugcggccgcgugguccgcgcagggcggggcgggccuggaggccggggcccgcgcgcugauggacgccguggacgcgc

SEQ ID NO: 399336 - RNA, 81 nt, Human herpesvirus 1
gaagagggaagaagaggggucgggauccaaaggacggacccagaccaccuuugguugcagaccccuuucuccccccucuuc

SEQ ID NO: 399337 - RNA, 57 nt, Human herpesvirus 1
ggguggcagcagcgccgggucucgcauuaggugauucagcucggcuugcgccugccc

SEQ ID NO: 399338 - RNA, 76 nt, Human herpesvirus 1
cggcggacaugcugggccuaccguggacuccauuuccgagacgacguggggggagcggugguugagcgcgccgccg

SEQ ID NO: 399339 - RNA, 127 nt, Human herpesvirus 1
ggcgccggaggucgcgucggcguccagcucgacccgccggggcugcccggccgugaagcggcccguggcgucgcggccggccaccgccgcgcgggcccggcggcgcucgaugcggcccgcggaggcc

SEQ ID NO: 399340 - RNA, 60 nt, Human herpesvirus 2
accgguccccgccccguacguugugcacggcucccugacgaugcgugggguggcgagggu

SEQ ID NO: 399341 - RNA, 56 nt, Human herpesvirus 2
acguacugcagggccucgagcucggccaugacgcgcucgguggccgcgcgguacgu

SEQ ID NO: 399342 - RNA, 104 nt, Human herpesvirus 2
ggacgacgggcgcccccgccucgccugcgugggugccaucgcucggggguucgcgcaucucuggcuccaggccgccacgcugggcuucguggggucugucguuc

SEQ ID NO: 399343 - RNA, 63 nt, Human herpesvirus 2
gagcaucgccuccagggcgugggcgcgcucccgaagccgggagcgcgccuccggagcgagcuc

SEQ ID NO: 399344 - RNA, 66 nt, Human herpesvirus 2
ccucggccgguggcgacgacggcgacggggacugguuccccgacgccgguggucccggcgacgagg

SEQ ID NO: 399345 - RNA, 74 nt, Human herpesvirus 2
cuacgacugucugauccacagcaccccgaacacgcucgucgagcgggggcugcagucggcgcugaaguacgaag

SEQ ID NO: 399346 - RNA, 63 nt, Human herpesvirus 2
ggacgccggcacccccgaagccucgacgccucgcccggcagcgcggcggggagccgacgaucc

SEQ ID NO: 399347 - RNA, 61 nt, Human herpesvirus 2
cggcagggcguuucguuggucuaggaggguaaccacacuuacaacaacaacgcccaugucg

SEQ ID NO: 399348 - RNA, 73 nt, Human herpesvirus 2
cuggcgaucacguacagcucgcgcagcagcugcucgauguugucggccaucugcaucgugggcccgacgccgg

SEQ ID NO: 399349 - RNA, 55 nt, Human herpesvirus 2
ucgaccccgccguucgggcgguucugcgauccauauccgagcgcgcggcggucga

SEQ ID NO: 399350 - RNA, 60 nt, Human herpesvirus 2
gguccccggcacgagggugagcacgucguugaggacguccucgcccgcggcccgggggcc

SEQ ID NO: 399351 - RNA, 60 nt, Human herpesvirus 2
cccgcggcgucgcgacagaccagauacagcagggcguggaggcagucgcgcgugcgcggg

SEQ ID NO: 399352 - RNA, 61 nt, Human herpesvirus 2
cacggccgacguccccagcgugugugucaccgccaccggccccaacgcggugucggcggug

SEQ ID NO: 399353 - RNA, 74 nt, Human herpesvirus 2
ggucuuccacgagcucgcggcaccccggcgggcgcuuaaacugcacgucgcuggcagcgguggccguggauacc

SEQ ID NO: 399354 - RNA, 70 nt, Human herpesvirus 2
gccagguccucgcccggcagcggcgaguagaggaucaccacgcgcacguccuccgggucgggcaccuggc

SEQ ID NO: 399355 - RNA, 64 nt, Human herpesvirus 2
gcgcguggcgcccggggacguggcgcuggaccaggccugcuuccggaucucgggcgcggcgcgc

SEQ ID NO: 399356 - RNA, 75 nt, Human herpesvirus 2
ccggcgcgcucucgaccgcgguucccgagucguacgcagggaccauuugggagucugcgguugggagcgcgccgg

SEQ ID NO: 399357 - RNA, 82 nt, Human herpesvirus 2
gggcgaggccgggucgcgggcggccgcgcccagggccgacaccgcguccgccagggcgccaugcgcccgcacggccgcgucc

SEQ ID NO: 399358 - RNA, 90 nt, Human herpesvirus 2
gcccgcccgcgacgagggucucauuagcaucgcgggcggaagcggaagccgcccgcgccgggcgcuaaugagaugccgcgcgggcggagc

SEQ ID NO: 399359 - RNA, 55 nt, Human herpesvirus 2
acugggccgucgugcgggccaggaucgccuuggccccgaacacaaccggcucggu

SEQ ID NO: 399360 - RNA, 94 nt, Human herpesvirus 2
gcuggucgggcggaugacgcuuuccgcgccgucccggcccacgacgaccucgugcaggugggccgugaugcgcgggcggcgggucgccugccgc

SEQ ID NO: 399361 - RNA, 72 nt, Human herpesvirus 2
cucguacccgggcaccacguggcccucgcgguccagcugcggguuggccgccacgugcgugccgggcacgag

SEQ ID NO: 399362 - RNA, 78 nt, Human herpesvirus 2
cgggacgggugaguucgcuaggcaagcacggacuggcgguuacacgugcaugcgugccgagugaacucucccgccccg

SEQ ID NO: 399363 - RNA, 113 nt, Human herpesvirus 2
gggucgcgggucccuggguaugcgcgggacccuggguucucugggagaucguggaacucgcgguucccugggcucucggggaacccggggcucccuggggacacguggugccc

SEQ ID NO: 399364 - RNA, 70 nt, Human herpesvirus 2
gccaggugcccgacccggaggacgugcgcguggugauccucuacucgccgcugccgggcgaggaccuggc

SEQ ID NO: 399365 - RNA, 57 nt, Human herpesvirus 2
gucggcgcggggguggccaaacaggacccaggggucgacuuccaucuccgugauggc

SEQ ID NO: 399366 - RNA, 88 nt, Human herpesvirus 2
ccuccgcgaagcgcgcgcgcgccucccccgcggcgucgcgacagaccagauacagcagggcguggaggcagucgcgcgugcgcggggg

SEQ ID NO: 399367 - RNA, 124 nt, Human herpesvirus 2
gcgcauauggacgaccgcguccgacggagaggccguggagcuugccagcgagacgcucaugaaacgcgaguugacgagcuucgcgguacuacucccccagggcgaccccgacguccagcugcgc

SEQ ID NO: 399368 - RNA, 80 nt, Human herpesvirus 2
augcugcucgcggccaugaagaccaguaacgcgcugugcguucgcggggcgcgucccuucagccacuuuaagcgcagcau

SEQ ID NO: 399369 - RNA, 108 nt, Human herpesvirus 2
cgggcgcgggcgacgccauggcgcccggcgcgccggacuucugcgaggacgaggcgcacucgcaccgcgccugcgcgcgcuggggccugggcgcgccgcugcggcccg

SEQ ID NO: 399370 - RNA, 66 nt, Human herpesvirus 2
gcugccgucccggucuccgccgcgcagccggugugccccuggugcggcggcgaccgggacgccggc

SEQ ID NO: 399371 - RNA, 66 nt, Human herpesvirus 2
agaccugguuuuuggugccccucaucgcgcugucgcucgcguccuuccgggggaucaagauaggcu

SEQ ID NO: 399372 - RNA, 57 nt, Human herpesvirus 2
cguucauggcccggccggcggugcgagcccuucccggugccggaaggggcgugggug

SEQ ID NO: 399373 - RNA, 86 nt, Human herpesvirus 2
ggcaacagaaggugggcgucgacgaggcgucggcgggccugacgcucggcggcgaugcgcugcgcgucccuuuuuuggauuuugcc

SEQ ID NO: 399374 - RNA, 64 nt, Human herpesvirus 2
gugugcggccgcgacaugucccacagcuguaccgccgccagccgggcgugcguggccgccaggc

SEQ ID NO: 399375 - RNA, 55 nt, Human herpesvirus 2
ucucauuagcgcccggcgcgggcggcuuccgcuuccgcccgcgaugcuaaugaga

SEQ ID NO: 399376 - RNA, 88 nt, Human herpesvirus 2
gcggaaaaacggaggauggaagggcagaagauggggagucccgauccuccuccugcauccccucgccuuccauucuccggcccuccgc

SEQ ID NO: 399377 - RNA, 91 nt, Human herpesvirus 2
ggacgaucccgggcccuuggguuccgcggacgccgggcggcaagaccugccccggcgcgucguccgucacgagccccugggccgcucguuc

SEQ ID NO: 399378 - RNA, 69 nt, Human herpesvirus 2
gccggcgucccggucgccgccgcaccaggggcacaccggcugcgcggcggagaccgggacggcagcggc

SEQ ID NO: 399379 - RNA, 87 nt, Human herpesvirus 2
gcgucgucgcccuagaggcuguccgccgggcgugauguuuuccgcaucuacgacccccgaacagccccuggggcugucgggcgaugc

SEQ ID NO: 399380 - RNA, 87 nt, Human herpesvirus 2
ccgcgcgcgucggucgcgccugcccggcccagacucugugcuugggugucggucugagccugggucaugcgcgaccggggcgcgcgg

SEQ ID NO: 399381 - RNA, 70 nt, Human herpesvirus 2
cccacaaaguccgggaggggccgcaggaccccuuggaguuugugcaggaacuucucccgggcgucguggg

SEQ ID NO: 399382 - RNA, 68 nt, Human herpesvirus 2
uucaccaacucguucgcgcgcugcaggagguucuugcccucgcagaccgucacgcgaaugguggugag

SEQ ID NO: 399383 - RNA, 55 nt, Human herpesvirus 2
gcgggcgagggcgucuaaggccucgcgcaucucgcgggccuccgccucgacccgc

SEQ ID NO: 399384 - RNA, 68 nt, Human herpesvirus 2
uugguggcggcguagaugcgucucuccagggccuccaggaagaccagccugucgccuauggccaccag

SEQ ID NO: 399385 - RNA, 60 nt, Human herpesvirus 2
aacggcgcccggaggacggccguggcguaaaacagcgcucggcggaccaucggggcgguu

SEQ ID NO: 399386 - RNA, 64 nt, Human herpesvirus 2
cacgaagccccggcggguuuguccgcuucguaacuucgauacguaacgcccugggguugccgug

SEQ ID NO: 399387 - RNA, 58 nt, Human herpesvirus 2
gcggaccuggugcccggacgucccgcgagcccuccccgccggacgccgccauggccgc

SEQ ID NO: 399388 - RNA, 130 nt, Human herpesvirus 2
gggcguggccgcccuucuaaaaaaagugagaacgcgaagcguucgcacuuuguccuaauaauauauauacuauuaggacaaagugcgaacgcuucgcguucucacuuuuuuuagaagggcggccacgccc

SEQ ID NO: 399389 - RNA, 65 nt, Human herpesvirus 2
cgcgggcccgguucgaggccucgggcgccccggcgcccgugugggcgcccgagcugggcgacgcg

SEQ ID NO: 399390 - RNA, 77 nt, Human herpesvirus 2
uccggcgucgccucggggcuccgccagggcgcccugguccaccaggccgucagcgggggagcccugggcgcgucgga

SEQ ID NO: 399391 - RNA, 84 nt, Human herpesvirus 2
gcugcccgccucggagguggagucgcggugaaggucgucgucagagauucccaccucggucuccuccuccgagucgcugcuggc

SEQ ID NO: 399392 - RNA, 68 nt, Human herpesvirus 2
gggagaaggccgugguguugcggagcgccaccacgacgggcgcgccgaggagcaccgcggccagaacc

SEQ ID NO: 399393 - RNA, 87 nt, Human herpesvirus 2
ccgcgcgccccggucgcgcaugacccaggcucagaccgacacccaagcacagagucugggccgggcaggcgcgaccgacgcgcgcgg

SEQ ID NO: 399394 - RNA, 64 nt, Human herpesvirus 3
ggcuguguuguuguuuccaaacggaacugugguaacgcuucuaggauucgaacgacgacaagcc

SEQ ID NO: 399395 - RNA, 59 nt, Human herpesvirus 3
uuaccgucugguaucucauucggggacaaucguuuugaagacagggauacggaggguaa

SEQ ID NO: 399396 - RNA, 71 nt, Human herpesvirus 3
cgggggaauuaucgggguucuggaucgcggcagggaaaaugauuucugucucuggcgccccgguucccccg

SEQ ID NO: 399397 - RNA, 66 nt, Human herpesvirus 3
ggucuccccggacgguccaaaccgcacccuguuggaugggaggggugccgauccgggccaagggcu

SEQ ID NO: 399398 - RNA, 80 nt, Human herpesvirus 3
gcccggccgcauguugcucgaagagcacauaaccucuuaacaccguacagaggggauggcgucggugcaugugaguuggc

SEQ ID NO: 399399 - RNA, 60 nt, Human herpesvirus 3
gguugugucggucucuccaagcucguuuuaugagaguuuacaaguagagcccacacaauc

SEQ ID NO: 399400 - RNA, 86 nt, Human herpesvirus 3
ggcuauggaaccuaauuuaauagggcuaugucccgccggauggcaugcucggauacuuggcucuguauuaaaucgacuccucagcc

SEQ ID NO: 399401 - RNA, 66 nt, Human herpesvirus 3
uugccuacccucuuauuggaaauauagauauuacguuuaucaugccaaugggaguguuucaggcaa

SEQ ID NO: 399402 - RNA, 59 nt, Human herpesvirus 3
gccguguuacugguaauggcggcaguuauuuacgcuauggacuguuugguggacacggu

SEQ ID NO: 399403 - RNA, 64 nt, Human herpesvirus 4 (Epstein-Barr virus)
uccuguggugugcuuuccaccggugguagaauuggccuuuccaccuguugaggugaccguggga

SEQ ID NO: 399404 - RNA, 80 nt, Human herpesvirus 4 (Epstein-Barr virus)
gacuuccagacuauuuucugcauucgcccuugcguguccauuguugcaaggagcgauuuggagaaaauaaacugugaguu

SEQ ID NO: 399405 - RNA, 58 nt, Human herpesvirus 4 (Epstein-Barr virus)
agcugcugcuugucgaggaugguccuuuggcgcggauccucgcaggccgccagcagcu

SEQ ID NO: 399406 - RNA, 77 nt, Human herpesvirus 4 (Epstein-Barr virus)
ugggcguaggcagcaccauggggaaaacaauguccacaucauuggacucuaacuucacgguggcaugcucucgucca

SEQ ID NO: 399407 - RNA, 65 nt, Human herpesvirus 4 (Epstein-Barr virus)
gacacgccgcucguggaccacgccaucuuccucccggcugauuguguggcugacggugccguguu

SEQ ID NO: 399408 - RNA, 61 nt, Human herpesvirus 4 (Epstein-Barr virus)
ggggagcucuuccgcuucaucugggcccacuacgugaggcccacgguggcggcagaccccc

SEQ ID NO: 399409 - RNA, 74 nt, Human herpesvirus 4 (Epstein-Barr virus)
agcccggugucgauggaggccaucucgugaugcaccucaaagguuaccgcguccacccuggccucccggcggcu

SEQ ID NO: 399410 - RNA, 61 nt, Human herpesvirus 4 (Epstein-Barr virus)
cccuggguagucacguucagccgcaacucgcguagcaccacguggcugccgauaaacaggg

SEQ ID NO: 399411 - RNA, 59 nt, Human herpesvirus 4 (Epstein-Barr virus)
uccaggggcgcgacugaccuggcaccagacucgguaaccagcaagcuccgcuuccuaga

SEQ ID NO: 399412 - RNA, 67 nt, Human herpesvirus 4 (Epstein-Barr virus)
caugucagcuccacgcaaagucagauugccuucuguuaaggcuguugacaugagcauggaagacaug

SEQ ID NO: 399413 - RNA, 65 nt, Human herpesvirus 4 (Epstein-Barr virus)
ggucagcaaggccaucccucgcagcaccgucaaggugacggugccccaggaggccuuuguggauc

SEQ ID NO: 399414 - RNA, 63 nt, Human herpesvirus 4 (Epstein-Barr virus)
gccccuggcguggaaguuaauguccagagaucaccucugauucuggcccccaacgccucuggc

SEQ ID NO: 399415 - RNA, 62 nt, Human herpesvirus 4 (Epstein-Barr virus)
ucaccguuccucauuuugugugccuccucaaauguuccagaagucggccacaggggaggugg

SEQ ID NO: 399416 - RNA, 61 nt, Human herpesvirus 4 (Epstein-Barr virus)
uccagggccgccuccagauggccgaggccgaagcugcgccuggaaaaggaggccgcccgga

SEQ ID NO: 399417 - RNA, 58 nt, Human herpesvirus 4 (Epstein-Barr virus)
cuugacagucuuggagaacccccucucagugaaggugggauccgccagggucugcagg

SEQ ID NO: 399418 - RNA, 64 nt, Human herpesvirus 4 (Epstein-Barr virus)
ccgggguuugcccaacucuuauucuucccguuaacaggaagaaugauggugggggaaccaccgg

SEQ ID NO: 399419 - RNA, 130 nt, Human herpesvirus 4 (Epstein-Barr virus)
ugaguccuucggauacugggccuccugccguggggccuccugccgcggggccuccugccgcggggccuccugccgcggggccuccugccgcggggccuccugccgcggggccuccugccgcggggccucg

SEQ ID NO: 399420 - RNA, 130 nt, Human herpesvirus 4 (Epstein-Barr virus)
uggguuguugugguggcauugguagccguucgugugauaaugagugucuugggggccgugccaagacccgagacaguaaugucaaauguccgauugcucgcaaaugcaccagaaauauuuucacaacccg

SEQ ID NO: 399421 - RNA, 82 nt, Human herpesvirus 4 (Epstein-Barr virus)
gauggcggcuggagagaaggaugcccggcuccccgccgccuccugcacacgagcggccagggccuccaucucugccgccauc

SEQ ID NO: 399422 - RNA, 105 nt, Human herpesvirus 4 (Epstein-Barr virus)
ggcaggggguccugcggucgaaggugcuggccuugagggcgcugaggacugcaaacuccacguccagacccugaggcgcgcuggcguagaaguaggccugcugcc

SEQ ID NO: 399423 - RNA, 78 nt, Human herpesvirus 4 (Epstein-Barr virus)
ugugccgcuuggagggaaacaugaccaccugaagucuguuaaccaggucagugguuuuguuuccuugauagagacaca

SEQ ID NO: 399424 - RNA, 79 nt, Human herpesvirus 4 (Epstein-Barr virus)
ccuuugguggaaccuaguguuaguguugugcuguaaauaaguguccagcgcaccacuagucaccaggugucaccggagg

SEQ ID NO: 399425 - RNA, 61 nt, Human herpesvirus 4 (Epstein-Barr virus)
ggcagguggagugggacacaguuagagaacauuaguccucuggucccuaucuccacccgcc

SEQ ID NO: 399426 - RNA, 77 nt, Human herpesvirus 4 (Epstein-Barr virus)
guagauguagccgcacggacccggcuggcucuggcugcccagauuauccucgcuagucugugcacccugcaugaugc

SEQ ID NO: 399427 - RNA, 78 nt, Human herpesvirus 4 (Epstein-Barr virus)
cccguggggggucuuaguggaagugacgugcugugaauacagguccauagcaccgcuauccacuaugucucgcccggg

SEQ ID NO: 399428 - RNA, 59 nt, Human herpesvirus 4 (Epstein-Barr virus)
uccaucagcucucuuuuccccgggcugguuuugcuggcccuggagcugaaguugaugga

SEQ ID NO: 399429 - RNA, 66 nt, Human herpesvirus 4 (Epstein-Barr virus)
ggcccgguacugggggugcgccgugaaggcggcggcgcaguccgccuucagcgccuccaccgcguc

SEQ ID NO: 399430 - RNA, 99 nt, Human herpesvirus 4 (Epstein-Barr virus)
ccguguccaguuccggcucccggcagccucccuucaucuccagcaggaccaguuucuggagaacguagcgagcguagcuggcggcugucauggugacgg

SEQ ID NO: 399431 - RNA, 68 nt, Human herpesvirus 4 (Epstein-Barr virus)
gccaucauccccugcuugggacccgaccgcacuugcaugcggccggugguccugcggggggugacggu

SEQ ID NO: 399432 - RNA, 60 nt, Human herpesvirus 4 (Epstein-Barr virus)
gacauacucgggcugcucaugcccgugggccuccacgaagcuguccgccucgagcguguc

SEQ ID NO: 399433 - RNA, 129 nt, Human herpesvirus 4 (Epstein-Barr virus)
gcccccccaguugacccaaguauccccucagcaaccaauggaggggccguugguaccagagcagcagauguucccuggugcccccuuuagccagguugcugaugugguccgggcaccugggguaccggc

SEQ ID NO: 399434 - RNA, 56 nt, Human herpesvirus 4 (Epstein-Barr virus)
ucaacaggaggcgcagccugucauuuucagaugauuuggcagcagccaccugcgga

SEQ ID NO: 399435 - RNA, 78 nt, Human herpesvirus 4 (Epstein-Barr virus)
cuggcacgguggcuugggcugugguaaccggugggcucguaaaaguccagcggggccgcaguuugcuagaagugcugg

SEQ ID NO: 399436 - RNA, 112 nt, Human herpesvirus 4 (Epstein-Barr virus)
acagcauaaaccaggagaaggcgcaaaugaguccggugaaggugacguugcauaucaggcgcggcuuccuuccgaauuuugugcgcaaaaguuuccagaugaugauaacugu

SEQ ID NO: 399437 - RNA, 81 nt, Human herpesvirus 4 (Epstein-Barr virus)
ggcccccacuuuuaaauucuguugcagcagauagcugauacccaauguuaucuuuugcggcagaaauugaaagugcuggcc

SEQ ID NO: 399438 - RNA, 58 nt, Human herpesvirus 4 (Epstein-Barr virus)
ugaguagagcuggguagaccugucguuguauugggaucagcaaauccaguuguauuca

SEQ ID NO: 399439 - RNA, 57 nt, Human herpesvirus 4 (Epstein-Barr virus)
gugacccggggcuccggggugacccagccaagcgugaccaaggggcccgugggugac

SEQ ID NO: 399440 - RNA, 64 nt, Human herpesvirus 4 (Epstein-Barr virus)
gcuguacauccagcugcuguaugccugguaacccauaggccauccggcggccaggguuugcagu

SEQ ID NO: 399441 - RNA, 102 nt, Human herpesvirus 4 (Epstein-Barr virus)
ggggcucuguaacauuuggugggaccugaugcugcuggugugcuguaaauaagugccuagcacaucacguaggcaccaggugucaccagggcuacuugccuc

SEQ ID NO: 399442 - RNA, 71 nt, Human herpesvirus 4 (Epstein-Barr virus)
cugcaauuucucagugucacauugcacguguaguaaccugcaugcgcaagggucacauuggggauuaucag

SEQ ID NO: 399443 - RNA, 92 nt, Human herpesvirus 4 (Epstein-Barr virus)
cucgccaccugugcucguauaguaagcuggaguuccaucucccguuaccugagagcauggccuccguguuugccugcuggggcuguggcgag

SEQ ID NO: 399444 - RNA, 69 nt, Human herpesvirus 4 (Epstein-Barr virus)
cugcgggcgagcaucgggucaucgggcauaucggccuugaccgcguugaacaugcuguaugccucgcag

SEQ ID NO: 399445 - RNA, 74 nt, Human herpesvirus 5
uccaagucagagcagcgucggucaugacgcggcgaaacgccguugaccuggaccgaccgccgcuuuggucggga

SEQ ID NO: 399446 - RNA, 101 nt, Human herpesvirus 5
gccgcuggcgagcaacagcagccgccgucgcuggugggcacgggcgugcaccgcggucugcucacggccacgggcugcugucugcugcacaacgucacggu

SEQ ID NO: 399447 - RNA, 82 nt, Human herpesvirus 5
gagccaaacugcgagcagccggagcccgcacacuggcuggaauacguggcgguccaguggcaggcccggguucgcgauucuc

SEQ ID NO: 399448 - RNA, 59 nt, Human herpesvirus 5
gcccaccggcagauagguaaagcggugggugguaaaaaccgcuuuggcuacgguggugu

SEQ ID NO: 399449 - RNA, 85 nt, Human herpesvirus 5
ggaaacuguggacgcuguuuccgaauaccgggaggagaucgugcuucccucuuccaaggaucggaaaguagcguccgucguuucc

SEQ ID NO: 399450 - RNA, 76 nt, Human herpesvirus 5
uugugacguagcaauuaucguauugugcaugugucguucaucacagaguuuaguauacuaauaugaagcgucgcga

SEQ ID NO: 399451 - RNA, 69 nt, Human herpesvirus 5
gacguacuuguauuugcuggcaaaaaguggcgcguaccgacagucggccggcaaaauguagguggcguu

SEQ ID NO: 399452 - RNA, 75 nt, Human herpesvirus 5
cgccgucugcguguccucgcuggguggcagcggcgggacucgcgacggcccuucugcggaggaacagcaacggcg

SEQ ID NO: 399453 - RNA, 61 nt, Human herpesvirus 5
ccucaugucacaggcgcccgaggcgucgcacaugacgucugagcgccgcugacaguuuugg

SEQ ID NO: 399454 - RNA, 59 nt, Human herpesvirus 5
cguccgcgugucuaaaccgcgugcucgcugacgcggguuugcuuccuauauaguggacg

SEQ ID NO: 399455 - RNA, 64 nt, Human herpesvirus 5
cggcugcugugaaaacgggcacgguuuuauaggcauuaggacuuccccgucguacuggcggcug

SEQ ID NO: 399456 - RNA, 84 nt, Human herpesvirus 5
gagcaguagcggacgugucaucucgcccggagugcgcagaggcacgcauucgccgcgauaacgacaggucacacgcuguaguuc

SEQ ID NO: 399457 - RNA, 76 nt, Human herpesvirus 5
ggcgcucuggauggauugggcggacgugcguagcuguauuauuaaggcgcuaacgccucgucugagccggggugcc

SEQ ID NO: 399458 - RNA, 75 nt, Human herpesvirus 5
ccacgcacguugaaaacaccuggaaagaacgugcccgagcgaacguccucuuuccaggugucuucaacgacgugg

SEQ ID NO: 399459 - RNA, 57 nt, Human herpesvirus 5
gugcaacagcccgugucgcgcaaaaucguccaaacugugcgccagguaguaaagcac

SEQ ID NO: 399460 - RNA, 111 nt, Human herpesvirus 5
caacgucagcgucauauugcgcagcaggccgcgcagucguacguagccgcgggugugaucuacgaacugguguaggcccagcugguagugcuugaugagauguagacguug

SEQ ID NO: 399461 - RNA, 79 nt, Human herpesvirus 5
cagcguccaacacgccguccuugacgacgcagcuggccugauagcuggacacguuguuaagcggcggaaagcgaaacug

SEQ ID NO: 399462 - RNA, 107 nt, Human herpesvirus 5
cgccgucgucgacgucgccgucgucacuucuuucgcucccucgacccagcagcgcccacagcgcgggcgagacggugcaggaguccgaggcggcggcgacggcggcg

SEQ ID NO: 399463 - RNA, 57 nt, Human herpesvirus 5
cgacgaagaugcgucgaaucgccgccgugauggugcgguucgccgucaucguugucg

SEQ ID NO: 399464 - RNA, 56 nt, Human herpesvirus 5
guggugcacguugaugcuggggauguucagcaucuugagcggcagcgcguacacau

SEQ ID NO: 399465 - RNA, 94 nt, Human herpesvirus 5
cgagaaagucgcagaaggucuccacgaacguguccucggugaagcgaaugcgcuucagaucguggacguguuugcgaaaccgcgacaguucucg

SEQ ID NO: 399466 - RNA, 81 nt, Human herpesvirus 5
ccauguuguccaaggguaucaugcugcguggcgcucuaaaucucagccucugucgcuuagugcucuuugucgacgacgugg

SEQ ID NO: 399467 - RNA, 127 nt, Human herpesvirus 5
gagcaauuuauagauucugaagugcuuuuauugcugauaacuguuguacuguauguugauguggcugucucaguacuaguggaauaguuaacgguaguacuacagggacauugacaggaacagguuu

SEQ ID NO: 399468 - RNA, 109 nt, Human herpesvirus 5
ggcgccgucguuaccgcggugcaacgcgcgcuagccgucuuugacguacuaagucgcgagaacuuggaacgccgcggcgcacagcucugucugacggaagcgacgagcc

SEQ ID NO: 399469 - RNA, 63 nt, Human herpesvirus 5
gcgccuggacguugcacgcggcggguaccgaaagcggcgcuaacgcggcaacggccacggcgc

SEQ ID NO: 399470 - RNA, 81 nt, Human herpesvirus 5
aacguggagacgcacgacaguauacgugccguugagguagaagacaaacucgcguaaccguuguccguuauacgucacguu

SEQ ID NO: 399471 - RNA, 65 nt, Human herpesvirus 5
gggucccggcacgggccgaggagaccacgaccgucccacccggcgugucgacucguccgagaccc

SEQ ID NO: 399472 - RNA, 109 nt, Human herpesvirus 5
aucacgucguccagcagcuggucgcguagcuccggcauggugcugccgggccguaccugcaggaaccaguugugcggaaugccgagcgacagcaccuggucgacguggu

SEQ ID NO: 399473 - RNA, 83 nt, Human herpesvirus 5
gcuggaagccguguaccgcgagauccucuuucguuucguggcucgccgcaacgacguggacuuuugguuacugcgcuuccagc

SEQ ID NO: 399474 - RNA, 86 nt, Human herpesvirus 5
acgcgagaugaacuguuccacggccagcgccuugucgcggcccaugagguagaagggcuguucgaugugguucuggucgggcgugu

SEQ ID NO: 399475 - RNA, 121 nt, Human herpesvirus 5
cgucagguacaugucuuucgguaucaucaacgcgaacaccuccguuuugagcguguuguaaagguagccgcgcaugacgcaggugagcaacgaggugaugcccagcgagacggucuugacg

SEQ ID NO: 399476 - RNA, 128 nt, Human herpesvirus 5
cccggaagguugggggcugggggcccggucaggagcuccgggagcggggucgaccgcgacggcuuccgggucucgcggcggcucccucucggcggcuccgguugggcuccccuccccccucucgaggg

SEQ ID NO: 399477 - RNA, 92 nt, Human herpesvirus 5
cuggugcuaguagggacguuugugcugcuggucauauuuguagcgucgcugaagucgaugugaagcagcaacccgaacgcgaccaggaccag

SEQ ID NO: 399478 - RNA, 88 nt, Human herpesvirus 5
guggcgucgacggugaacggcgcuacgucggccaacaaccacggcgaaccgccgucgccggccgacgcgcgcccgcgccucacgcugc

SEQ ID NO: 399479 - RNA, 121 nt, Human herpesvirus 5
cugcaggaaacguuggcgacggaauacuuugcgcuguuacacggaauccagaccuucagcuacgggcuggacuuucggucgcaguuggaaaagauccgcgaucugcggacucguuuugcgg

SEQ ID NO: 399480 - RNA, 108 nt, Human herpesvirus 5
gcaauaccuccuagaucacaacucccuagccagcgugccguguacguuacucacugccuguuucuacguggcuauguuugccaguuuguguuuuaucacggagauugc

SEQ ID NO: 399481 - RNA, 97 nt, Human herpesvirus 5
ggcgugcuugaggauauugcgacaguaguuggaaucaaaggaaaggcacaugcgcagcuccuugaccagcagcuugcagcgcuccugaaugcgcgcc

SEQ ID NO: 399482 - RNA, 78 nt, Human herpesvirus 5
cauagccugucuaacuagccuucccgugagaguuuaugaacauguaucucaccagaaugcuaguuuguagaggcuaug

SEQ ID NO: 399483 - RNA, 129 nt, Human herpesvirus 5
cgaugguggcucuacaguggguggugguggcucacguuuggaugugcucggaccgugacgguggguuucgucgcgcccacgguccgggcacaaucaaccgugguccgcucugagccggcuccgccgucg

SEQ ID NO: 399484 - RNA, 122 nt, Human herpesvirus 5
cgggcguuggacgcuuaucgggcgcgcaucgccgucgaguacgugcugauucgcgccgugcgcgacgagaucuacgcuguacuacgacgggacggcggcgcguugccacagcguuucgccug

SEQ ID NO: 399485 - RNA, 87 nt, Human herpesvirus 5
uuuugccggcguuuguuuucucaucaaccugucgauggaucgcuacugcgucaucguuugggguguagaauugaaccgcgugcgaaa

SEQ ID NO: 399486 - RNA, 55 nt, Human herpesvirus 5
gcagggcgcuuuggcaaaaggcgcaguuuucuagugaaauguugagcgccgcugu

SEQ ID NO: 399487 - RNA, 74 nt, Human herpesvirus 5
cgucgaugcguccgccguguuucucggcguacugcugcacccagacguggccgcuaaauauggcgacgcucaug

SEQ ID NO: 399488 - RNA, 61 nt, Human herpesvirus 5
uccauacguuuuugggaaaguugggcucggcccaacgcaacagaccuaggcacacgaugga

SEQ ID NO: 399489 - RNA, 90 nt, Human herpesvirus 5
gugcggggaggauugacgugugcggugcuuguggaacacgguguuuuaauauguauccgcguguaaugcacgcggugugcuuucuggcac

SEQ ID NO: 399490 - RNA, 57 nt, Human herpesvirus 5
acgucgcgagaccugguguuugaccagcagggggaagacgcagugguccgucggugu

SEQ ID NO: 399491 - RNA, 70 nt, Human herpesvirus 5
ccgcccgugcccgucuacgcgguccacggucugcacacguuaaugcgcgagacggcguuggacgcggcgg

SEQ ID NO: 399492 - RNA, 57 nt, Human herpesvirus 5
accagccguagccaaucccgaugacuuuccagcgcgugggauuguugccggccaggu

SEQ ID NO: 399493 - RNA, 62 nt, Human herpesvirus 5
gacacaacaccguaaagccguugcgcucgugggggcgcaugaaggguugcggguugcggguc

SEQ ID NO: 399494 - RNA, 69 nt, Human herpesvirus 5
gcaggccagaggcuaagccgaaaccguccggggaagcgggcgcgaguuuuccgacuuagccuuuggugc

SEQ ID NO: 399495 - RNA, 71 nt, Human herpesvirus 5
cggaggcaccaccgcagucggaggaggagaaugauuccaccacuccagucucuaacugccguguuccuccg

SEQ ID NO: 399496 - RNA, 55 nt, Human herpesvirus 5
gccgaggacgccgugggcggcgaucgcgcuuuugaccgcgagcggcggacuuggc

SEQ ID NO: 399497 - RNA, 60 nt, Human herpesvirus 5
guacgccaccgauccgcacgaccgcgacgaggucgcgcguacggacgaguggaagggugc

SEQ ID NO: 399498 - RNA, 79 nt, Human herpesvirus 5
uguagucccgagguggugugcgaucccuuccagucguguggagugguuugggguggcauccaaacgugagguauugaca

SEQ ID NO: 399499 - RNA, 65 nt, Human herpesvirus 5
gacgacgugguuuuugcuuccgagcuguguuuuuauugcagcggucguuuuaaccgcaggucguc

SEQ ID NO: 399500 - RNA, 61 nt, Human herpesvirus 5
gcacuugcgcguuaaguugcaauuuuccacgcacgaaauaacgguacagagcgcgaagugc

SEQ ID NO: 399501 - RNA, 67 nt, Human herpesvirus 5
gggcaacgcguugcgaacggugucguuaagcuuaacuuugcuuuccaccgugguguaaccgcgaucc

SEQ ID NO: 399502 - RNA, 85 nt, Human herpesvirus 5
aagccccacgucguugaagacaccuggaaagaggacguucgcucgggcacguucuuuccagguguuuucaacgugcguggauuuu

SEQ ID NO: 399503 - RNA, 59 nt, Human herpesvirus 5
gcgacggucuuuuuugccugggcugcgucacuucgcccagguuucuggagauuguacgc

SEQ ID NO: 399504 - RNA, 55 nt, Human herpesvirus 5
cgaggccgacagccuggagauguugcuggacaaguucuccacggaucaggccucg

SEQ ID NO: 399505 - RNA, 82 nt, Human herpesvirus 5
aguggcgugcgcgaccccuagucgguugaguuccgccagcaacgaguucauggcggcuguggcgggucgcgacgacgacacu

SEQ ID NO: 399506 - RNA, 96 nt, Human herpesvirus 5
gcccgccggggcuucuggagaacgccggggcagcagcgaucuggggaagcugcuaaaccccugcguuuuuauaugguagcucugccgagcgcgggc

SEQ ID NO: 399507 - RNA, 66 nt, Human herpesvirus 5
gcccccaaaacugucagcggcgcucagacgucaugugcgacgccucgggcgccugugacaugaggc

SEQ ID NO: 399508 - RNA, 108 nt, Human herpesvirus 5
acuuggaaauccccgugagucaaaccgcuauccacgcccauugauguacugccaaaaccgcaucaccaugguaauagcgaugacuaauacguagauguacugccaagu

SEQ ID NO: 399509 - RNA, 59 nt, Human herpesvirus 5
agaggaacuaucuucaucgggccggcccaagggaucgggaagaggagggugguucaucu

SEQ ID NO: 399510 - RNA, 65 nt, Human herpesvirus 5
ucuuccuccccaacuacuacuaccguguguacucccaccggcgagcugacgaguggcggaggaga

SEQ ID NO: 399511 - RNA, 77 nt, Human herpesvirus 5
uccacgcacguugaaaacaccuggaaagaacgugcccgagcgaacguccucuuuccaggugucuucaacgacguggg

SEQ ID NO: 399512 - RNA, 61 nt, Human herpesvirus 5
gauucuggucguuuugcugcucaucuaccguuguugcaucggcuuccaagacgaccuaguc

SEQ ID NO: 399513 - RNA, 67 nt, Human herpesvirus 5
gacagccuccggaucacaugguuacucagcgucugccagccuaagugacggugagauccaggcuguc

SEQ ID NO: 399514 - RNA, 78 nt, Human herpesvirus 5
ggcggcgugagcgcgaggcgucggagcucggggaaagcagcgcgacccggagaauggccggcgcugcgccgcgccgcc

SEQ ID NO: 399515 - RNA, 59 nt, Human herpesvirus 5
gguccagcagcgugugcaguucggcgucgagacagacggcgugauugagcaccugcgcc

SEQ ID NO: 399516 - RNA, 77 nt, Human herpesvirus 5
ugacguugaccguuguggggauuuuugacgggcaacacuuuuuuaccuaucacguuaauuccagcgauaaagcguca

SEQ ID NO: 399517 - RNA, 59 nt, Human herpesvirus 5
ggcacggaccgcaacgugcugcugaugucugccgcgguacgcacgucgccguccauguc

SEQ ID NO: 399518 - RNA, 56 nt, Human herpesvirus 5
gcgccggcacgaugcagcuggcccagcgccugugcgagcugcugaugugccgucgc

SEQ ID NO: 399519 - RNA, 79 nt, Human herpesvirus 5
ccgcacggcgguuucgccaccgcugacguucucaucgccgcccacgucaacgguggcgacaccguacuuucccaugcgg

SEQ ID NO: 399520 - RNA, 69 nt, Human herpesvirus 5
caacaggccggcgcgcacagccuccugucgauuacgaaucggcgucagguaggcgcgcaggaacuggug

SEQ ID NO: 399521 - RNA, 63 nt, Human herpesvirus 5
ggugaaacgcggaucuugacgguuggggggauagccauccgagcugucggaauccucgucgcc

SEQ ID NO: 399522 - RNA, 81 nt, Human herpesvirus 5
gaucucgcgcgugacgaggcgcggaccgugaguuauagccccaucguuauccaagacugcgccgcggcugucaccgacguc

SEQ ID NO: 399523 - RNA, 79 nt, Human herpesvirus 5
ggcagguucuuguacucaagagagcgauugguguugcggaacaugcggcucaccucgucaaucuugacgcgaccccgcc

SEQ ID NO: 399524 - RNA, 60 nt, Human herpesvirus 5
gacaacgugguccaguacguccauccuuugcauuccgguguccagacgggaagcguuguc

SEQ ID NO: 399525 - RNA, 66 nt, Human herpesvirus 5
ugaacgcuuucgucguguuuuucaugcagcuuuuacagaccaugacaagccugacgagagcguuca

SEQ ID NO: 399526 - RNA, 80 nt, Human herpesvirus 5
cguagaucagcagcgagccgcguaacgucugagcagccggcaguucgucgcggauguaacgcgugccguagaaagucacg

SEQ ID NO: 399527 - RNA, 129 nt, Human herpesvirus 5
gucuggccgagcggcgccaucuuggaggaggggcgagucgcgggcaccgccucgguacccccuggccgaggcgaguccgcggucgccgccuguuccgugaugcuaccuagagggcgcugucgaggcgac

SEQ ID NO: 399528 - RNA, 57 nt, Human herpesvirus 5
aggagcggggcguccgaaggcgaggauggcauggucucgccggagcgcccggcuuuu

SEQ ID NO: 399529 - RNA, 65 nt, Human herpesvirus 5
ggugccccucuuucugcgucguggcuaucacggaaguggaggcggacgagguagagguuuguacc

SEQ ID NO: 399530 - RNA, 55 nt, Human herpesvirus 5
gcuguaccgccgcgucgucucguauugucagaacaaugugaagaugguggaccgc

SEQ ID NO: 399531 - RNA, 59 nt, Human herpesvirus 5
ggaaagggcgcguucucgcccuugaggcugacgguucccaggccgagaacgcgcauucc

SEQ ID NO: 399532 - RNA, 75 nt, Human herpesvirus 5
cgcaccgcccauggguuccugcugaaaacgacacucgagcagucguugcauggcggguuccgagggcgguccgcg

SEQ ID NO: 399533 - RNA, 66 nt, Human herpesvirus 5
guguuugagccgcagauccgagagccucaccugcgugacggcgucuucggucucgagcaaaaacac

SEQ ID NO: 399534 - RNA, 98 nt, Human herpesvirus 5
cgguagccguuucaacagcggcgugaugauacggagcgcgaagagauugagugauaggcgcacgauggccaugcgcgucaguuguuggucaauuaccg

SEQ ID NO: 399535 - RNA, 77 nt, Human herpesvirus 5
guuaccggucacagagcgugcugacguggacgcacgaguguaauaccacggaaaacgguaguuuuguagccgguuac

SEQ ID NO: 399536 - RNA, 73 nt, Human herpesvirus 5
gccgaggacuuuaugacgcgcguggccgcgcuggcucgcgacgagggucugcgcgacauuuugggucagcggc

SEQ ID NO: 399537 - RNA, 89 nt, Human herpesvirus 5
gucuccauguguguauaaaaagcaaggcacguucauaauguaaaaaagaacacguuguaaacaagcuauugcuguaucauucggcugac

SEQ ID NO: 399538 - RNA, 94 nt, Human herpesvirus 5
cgacgugccgcgucuggagaacuauuuucuuugucaagucugucuuuacgagcuggacgaggacgagaugggcgaggagaugcugggcauguug

SEQ ID NO: 399539 - RNA, 83 nt, Human herpesvirus 5
uauuccuuuccuguuuuguacucguaaacuguugauguuguuuuuacauccaaaagggcaaguaagaaacaggaugaggcaug

SEQ ID NO: 399540 - RNA, 62 nt, Human herpesvirus 5
ccgacugugggaagcuguccacguagauaucaaaguccucgaugagcagcuccaacagcgug

SEQ ID NO: 399541 - RNA, 67 nt, Human herpesvirus 5
gcgcguuuccccguagccggccuacggcguuauugcaugucggagcugucggcgcuggguaacgugc

SEQ ID NO: 399542 - RNA, 79 nt, Human herpesvirus 5
gguauuuuuccacugggcggccgcaccuagggagcgcgagccccgugccgggcaugggccgcggcgguggaaaauuacc

SEQ ID NO: 399543 - RNA, 81 nt, Human herpesvirus 5
ggaacggaggaggcuuucgccacaccuauccugaaagcguugcauucuuuaugauaggugugacgaugucuuuaccauucc

SEQ ID NO: 399544 - RNA, 56 nt, Human herpesvirus 6
ccgcauucguaucgcucggcuacccguccugugucgaaaucgcggaugaauugcgg

SEQ ID NO: 399545 - RNA, 105 nt, Human herpesvirus 6
ucuccuuagaaauugaaccgugguuuaaaucuaauauucaucggcugaauacuuauucucaguucgcggaucaggauuuaucgaaaacgguucaauuggaggaga

SEQ ID NO: 399546 - RNA, 55 nt, Human herpesvirus 6
aucgauaauccucgggccaggguaaagcuaacguggcgcccuggcgauuuucgau

SEQ ID NO: 399547 - RNA, 90 nt, Human herpesvirus 6
gaugguuaaggaaaaagcgcugauuuuugagauuaaauucaaauauaaauauuuacgggauaaagaagaucacuuuguuucugaacuauu

SEQ ID NO: 399548 - RNA, 78 nt, Human herpesvirus 6
gggaccgagcggcggauggagcccgcucggucucgcacuuccgcgauacccagcgggcuccgucgccgcuucggaccc

SEQ ID NO: 399549 - RNA, 64 nt, Human herpesvirus 6
gaguauuggacucgcuccuguuccucaacaugaggaacugcaggaagagggaguccaacaacuc

SEQ ID NO: 399550 - RNA, 66 nt, Human herpesvirus 6
gauugauaaguuuccgacaugcccaacgucgacauccguccgaagcgcauggagauuuuuccaauc

SEQ ID NO: 399551 - RNA, 56 nt, Human herpesvirus 6
aaucuggguuccugcuuaguuacauguucccaaagacuuagcagauauucuagauu

SEQ ID NO: 399552 - RNA, 82 nt, Human herpesvirus 6
uccuccucucaggccuccggcuuccucuccgucccccgagcgggagcggcgaggcggccggagagccgggguacgaggagga

SEQ ID NO: 399553 - RNA, 70 nt, Human herpesvirus 6
cgguuguguuagcuuugcgauauucaaaguaaucucguugggauagcagaucgcaaaauugauacaaacg

SEQ ID NO: 399554 - RNA, 96 nt, Human herpesvirus 6
uccguucccucaucggcaucuccguccgcgucgugcgucggcaagucacagccgcccgccgcacacacggcgugagacgccgcgcgaggugacgga

SEQ ID NO: 399555 - RNA, 85 nt, Human herpesvirus 6
cugcagcgaugacaccagcugaugugcguaauagaaccucuucagaccuuuacguagaaaaucgucaauggugucaccgacgcgg

SEQ ID NO: 399556 - RNA, 55 nt, Human herpesvirus 6
gccgcagaguugcaagaaauguguaaguaucaguguuucgugucaguucuguggu

SEQ ID NO: 399557 - RNA, 108 nt, Human herpesvirus 6
ggggaacacgccggggaccgagcggcggauggagcccgcucggucucgcacuuccgcgauacccagcgggcuccgucgccgcuucggacccgagguccgacacgcccc

SEQ ID NO: 399558 - RNA, 70 nt, Human herpesvirus 6
aguaaauauuuaucugcauguauucggaccaauaagacaggucuuugcuuugccaguauaacuguuuauu

SEQ ID NO: 399559 - RNA, 130 nt, Human herpesvirus 6
uagauugugagguguuugaagucgaagucguuaauaucguauuuagaauuaaggaauugguauuuaggauacuuuuuccguauuuuuagucgcgaugagguuaugacgaugguuucguuugcauaguuua

SEQ ID NO: 399560 - RNA, 58 nt, Human herpesvirus 6
uuaagcagccgcgaacucguuaauaguuacuuugauguuaacucaggugguggcuugg

SEQ ID NO: 399561 - RNA, 56 nt, Human herpesvirus 6
caaccgcgguacccacugaucuuuaucuuuaugaagaaaaacaggaacugcgguug

SEQ ID NO: 399562 - RNA, 74 nt, Human herpesvirus 6
aucaaaguuuacgauggcucguccaaaggaagugguaacauuuauagguuuuggcgacuguuugaaauauugau

SEQ ID NO: 399563 - RNA, 99 nt, Human herpesvirus 6
ugcacacacgauaaaaugguauaguaaucauucagguuuacccgaggugacguuuuccccgaguaaaucgaacgauacuuacauuucaccgucuaggca

SEQ ID NO: 399564 - RNA, 58 nt, Human herpesvirus 6
gggugucuaaacgagucuggaguuuguuguuguacuucaagcucggaguuuggcaucu

SEQ ID NO: 399565 - RNA, 74 nt, Human herpesvirus 6
aucuagauaggugccuauugcugcuaugccugugccagaagcacggcgguugccuguauaggcagggucuaggu

SEQ ID NO: 399566 - RNA, 74 nt, Human herpesvirus 6
gcaguguacaaaugauuuaauuucgcuucuuggcccuaaaguagcucagcgagucauaauucauuuuaaacugc

SEQ ID NO: 399567 - RNA, 56 nt, Human herpesvirus 6
uguggaaaaaaacgcugguggguagguuguuuuccauggugucguuuaauuucaca

SEQ ID NO: 399568 - RNA, 62 nt, Human herpesvirus 6B
gagugaccucugguggugaauauagagacuugcuaaaugguguauucucauuaguguuauuc

SEQ ID NO: 399569 - RNA, 56 nt, Human herpesvirus 6B
cguggaggccagaaacgguaucgaugcaacgcuccauuucugagaucgcuuuuacg

SEQ ID NO: 399570 - RNA, 64 nt, Human herpesvirus 6B
gaguauuggacucacuccuguuccucagcauaaggaacugcaggaagagggaguccaacaacuc

SEQ ID NO: 399571 - RNA, 78 nt, Human herpesvirus 6B
gagcaguguacaaaugauuuaauuucgcuucuugguccuaaaguagcucagcgagucauaauucauuuuaaacugcuu

SEQ ID NO: 399572 - RNA, 79 nt, Human herpesvirus 6B
guugaagaauaagccuaagaaauauugcaugcauugcgagaugguagugcucaagcgaagucaugaauuuauguucagc

SEQ ID NO: 399573 - RNA, 79 nt, Human herpesvirus 6B
aaauaguugugaaaauggcugaauaauauuagaguccucuauuucuguuuuauuuguauuuucauuggaaaaacuguuu

SEQ ID NO: 399574 - RNA, 64 nt, Human herpesvirus 6B
ugguuuuauaagcucaagaggguuuuuuacaaugagccuggcuuaagaagggcuuuaaaaauua

SEQ ID NO: 399575 - RNA, 64 nt, Human herpesvirus 6B
uuauugaaaugggauaugauguguuuucgauguauuucaucgcauacgucucccaguucguuaa

SEQ ID NO: 399576 - RNA, 57 nt, Human herpesvirus 6B
guaaccgcgguacacacugaccuuuaacuuuaugagaaaaacaggaacugcgguugc

SEQ ID NO: 399577 - RNA, 63 nt, Human herpesvirus 6B
ccgugguuagacuuggugcucgcgauacuggcuggcuugcgagagcuacaaugucuuuuacgg

SEQ ID NO: 399578 - RNA, 97 nt, Human herpesvirus 6B
ucgccccgaaaccgcaacgcggcagagucggcgccacacccccgucccccgaguucgcgaugggcuggcgccgacccugccgcggcaacgaaggcga

SEQ ID NO: 399579 - RNA, 58 nt, Human herpesvirus 6B
gggugucuaaaugagucuggaguuuguuguuguacuucaaauucggaguuuggcaucu

SEQ ID NO: 399580 - RNA, 92 nt, Human herpesvirus 6B
ccugcuccugcucucagggcuccggcuuccucuccgucccccgagcgggagcggcgaggcggcgagaaagccgggguacgagaaggaagagg

SEQ ID NO: 399581 - RNA, 129 nt, Human herpesvirus 6B
aaacugaaaucgugcacagauacuacuacugacauuucugaagaugaucuccuuuugugugcggccaggaggucgagugacaucuuacaaauaaugcaauuaguguuuacggugcaugugcaauuuuuu

SEQ ID NO: 399582 - RNA, 66 nt, Human herpesvirus 6B
gggaucuugaugcguauucucacucaaugguugucuaugugugacguccgcaucaugguauagucc

SEQ ID NO: 399583 - RNA, 82 nt, Human herpesvirus 6B
ugggugauggaugugcacuuucuaagacgagauguuucugugcgucuauuagauaagagaguuuccgggcauguuuucccca

SEQ ID NO: 399584 - RNA, 72 nt, Human herpesvirus 6B
ugcacuugucauuucggaagguagcgucagauucgauauauaaugucuuugaaggacuaucugagacaguca

SEQ ID NO: 399585 - RNA, 96 nt, Human herpesvirus 6B
ggaacuggaacaugaugaagagacugaugaugaugaugaugaucuaguucuggagugcugauaguuaaauguuauaagcuugucuguuccgguuuc

SEQ ID NO: 399586 - RNA, 85 nt, Human herpesvirus 6B
gggacuugauauauccgagugucguuuuuuguauaaaaguuaaaaguuauaaagcccgggcgaacaauuggauuuucagaguuuc

SEQ ID NO: 399587 - RNA, 93 nt, Human herpesvirus 6B
ccaugugugagcguuaagaauuggugucauucgugguauuucugugugguugaucucuccgugaguggacgccgacauucuauuuugcuuugg

SEQ ID NO: 399588 - RNA, 58 nt, Human herpesvirus 6B
cuaauggagaaguucaagucgcugcccaaaggccagccauuugaaaaauuuccagagg

SEQ ID NO: 399589 - RNA, 67 nt, Human herpesvirus 6B
gacguccgucgaacaacgcguuggcgaaauucaccagagguucgccgcaaaguugcucguugauguu

SEQ ID NO: 399590 - RNA, 58 nt, Human herpesvirus 6B
accgguaauugugaaacuuuaauaguuaauucauguuuugguuccacuugugcacggu

SEQ ID NO: 399591 - RNA, 73 nt, Human herpesvirus 6B
gcaacgcggcagagucggcgccacacccccgucccccgaguucgcgaugggcuggcgccgacccugccgcggc

SEQ ID NO: 399592 - RNA, 69 nt, Human herpesvirus 6B
ucugggaucccgcucggagcucucucaccccguguuggagugggagagaacagagcugguccugacgga

SEQ ID NO: 399593 - RNA, 59 nt, Human herpesvirus 6B
gggaugcuucuuuccaguucuuuaaauauauucuuuagagauucuggaaucgagcacuc

SEQ ID NO: 399594 - RNA, 70 nt, Human herpesvirus 6B
uagguggguguggaguauggugucugaaaaaugguggcgaucuguauaucuaugcuuuuguacucgcuua

SEQ ID NO: 399595 - RNA, 96 nt, Human herpesvirus 6B
aagacaagggacuuuaauuggauugcauaaauuguuuauuuuguuacaggaagagagaaugacaagcuaauguaugcugauugauguguuuuucuu

SEQ ID NO: 399596 - RNA, 82 nt, Human herpesvirus 6B
ggagaccgagcggcggauggagcccgcucggucucgcacguccgcgauaccgagcgggcuccgucgccgcuccggacccucc

SEQ ID NO: 399597 - RNA, 72 nt, Human herpesvirus 6B
gacguuuugaauucucauuuaaaagcgauagaggaugcuuugcuguuuacgaaugauggggagguaaacguc

SEQ ID NO: 399598 - RNA, 65 nt, Human herpesvirus 7
gcuguucgugcuucacaguguuggauguucuuuuuuaacauuuguggccaggcaauugaacgagu

SEQ ID NO: 399599 - RNA, 85 nt, Human herpesvirus 7
gaucaguuaaaucaaguauuucagucuguaguauucugugcauuuuuuuagaauuguuuauagacguggaauuucuuggcucguc

SEQ ID NO: 399600 - RNA, 82 nt, Human herpesvirus 7
caucucuggucaguuggagucguucuauguaugaaaaaaacauuaucgcguuuucaugcucaucgucuccaagccucagaug

SEQ ID NO: 399601 - RNA, 90 nt, Human herpesvirus 7
uguuaccagcugugauuauugcauuugcuucauuuuuuggaagacuguuuagaaauggagggaauagacgauuaucaaacaaagcguuca

SEQ ID NO: 399602 - RNA, 101 nt, Human herpesvirus 7
ucuguaaugaaccaaaucugauauuuuuaacacaauggcaauuagggugccgaaauaagaugccauugaaugcguuggaaauauuagcaugcaucuacaga

SEQ ID NO: 399603 - RNA, 119 nt, Human herpesvirus 7
auaacgggauaggaaucauagagauauuuuggguaauaugucuuuagaauacuugcccccuguuagaagacguauuggucaauauaaucauuugagaaucuacaaaaaaauucuguugu

SEQ ID NO: 399604 - RNA, 93 nt, Human herpesvirus 7
augauuaguaguacugccacuggagaaugucgaggucuuuguaaaauuuaaggauguagauucgacauucucuuuaguuguugcgauagucgu

SEQ ID NO: 399605 - RNA, 57 nt, Human herpesvirus 7
uagaucgcuuuaaaaucuuauuucccucuaugggacaaaaagauugugagcaauuua

SEQ ID NO: 399606 - RNA, 59 nt, Human herpesvirus 7
ugucaucguaauaauggaaacugugcuaguggcaggcuuccuauguguguaugaugaua

SEQ ID NO: 399607 - RNA, 67 nt, Human herpesvirus 7
ugauuuaagaggaauagcacgucgcggaucuugaagaguuuuugaugugacuauuucuugguuguua

SEQ ID NO: 399608 - RNA, 92 nt, Human herpesvirus 7
aguuuucgauuauaucuucuagaguuauugccgugcgugcuuuuucaagugggaccguauugguacauaucuuuaugagugaugcgaaaauu

SEQ ID NO: 399609 - RNA, 80 nt, Human herpesvirus 7
caaaaauuuaauagucauuuucaaauagaguuuaauuguacucacuuaauuucugguauggaauuggcgagggauuuuug

SEQ ID NO: 399610 - RNA, 80 nt, Human herpesvirus 7
cuaaauggauugucuuuguauuauguugguguguugcccacuacacacugaaacauaguacaagggcuaacucuuaaugg

SEQ ID NO: 399611 - RNA, 66 nt, Human herpesvirus 7
guauucagcaauugacacauuuuacggugccuguguagguuuucguguuuauucaauucugaguau

SEQ ID NO: 399612 - RNA, 93 nt, Human herpesvirus 7
uuuggaauuugggucuggaacguagagagcauuagcauuaaaauuauaaaaagugccuuuaaaaugaaguuuuuuaguuucgcccucaucgaa

SEQ ID NO: 399613 - RNA, 79 nt, Human herpesvirus 8 (Kaposi`s sarcoma-associated h
ggccacguuauaauuguccccgguugaagccugcaccgccagcgguagcaggucugcccccagggauaucauaacagcc

SEQ ID NO: 399614 - RNA, 95 nt, Human herpesvirus 8 (Kaposi`s sarcoma-associated h
auccuaucagccuugguucccagggggugucuccgucugcucacggcgcucgugcggcacgacaggcauccucugacagagguguuugagggggu

SEQ ID NO: 399615 - RNA, 60 nt, Human herpesvirus 8 (Kaposi`s sarcoma-associated h
gggagacuacgcgccaauggaucgcuucgccuuccagagccccaggguguguggucgccc

SEQ ID NO: 399616 - RNA, 65 nt, Human herpesvirus 8 (Kaposi`s sarcoma-associated h
guaacagaucccggucguccacccccugacugauggauagggugccccuaaagaccgucuguugc

SEQ ID NO: 399617 - RNA, 84 nt, Human herpesvirus 8 (Kaposi`s sarcoma-associated h
uacccagccggguuuacgcagcugcguauacccagcuguguuuacgcagcgggguuuacgcagcuggguagacccagcugggua

SEQ ID NO: 399618 - RNA, 58 nt, Human herpesvirus 8 (Kaposi`s sarcoma-associated h
agggccagguguucuacaaccacuaugcuaccgaggaguggacgugggcuuugacucu

SEQ ID NO: 399619 - RNA, 63 nt, Human herpesvirus 8 (Kaposi`s sarcoma-associated h
cgccagaugcccgccuucgugcacuagaaguuuggcacgcagagcaggccuugcauauuggcg

SEQ ID NO: 399620 - RNA, 116 nt, Human herpesvirus 8 (Kaposi`s sarcoma-associated h
gaaggaggguugaauacaguuggggguaguccgcugguauucccagcugagguugccuuauuugguaaugcuuccggaaauaccaccugaguaccccauugguuuauaccuuguuu

SEQ ID NO: 399621 - RNA, 86 nt, Human herpesvirus 8 (Kaposi`s sarcoma-associated h
cggcacauugugucaaccagggcacccucccccaccgagugcuuuaaugcggagaggaaugguggccugguugacaccgcgugccg

SEQ ID NO: 399622 - RNA, 65 nt, Human herpesvirus 8 (Kaposi`s sarcoma-associated h
gggaaacaaugggggguuugaaaagggugcacauuuucagauauuuuaaaacuucauuguucucc

SEQ ID NO: 399623 - RNA, 118 nt, Human herpesvirus 8 (Kaposi`s sarcoma-associated h
acaagccgguccagcucuagggaaagcaggugugccuuugucuuucguucucgauuucgcacgaguuggcugcgcaguccaagggcgacccuucuuguuucuuccauggugggcuugu

SEQ ID NO: 399624 - RNA, 75 nt, Human herpesvirus 8 (Kaposi`s sarcoma-associated h
gagaucucaggccuuuguagaggccaucucgccggaacgccuagcgggucuccugcggaggccaauagacgucuc

SEQ ID NO: 399625 - RNA, 57 nt, Human herpesvirus 8 (Kaposi`s sarcoma-associated h
auccagccuuagccaucauugcgugaagcuuguggcgcuggaagaaggcugucggau

SEQ ID NO: 399626 - RNA, 66 nt, Human herpesvirus 8 (Kaposi`s sarcoma-associated h
auuguaaaagauccgauccucacauagcgugggauccagaagucccgagggcggguuauuggcagu

SEQ ID NO: 399627 - RNA, 130 nt, Human herpesvirus 8 (Kaposi`s sarcoma-associated h
uguacgcccuucuguaccaccaccugcaacugagcaaccacaaugacucccaggucuagauuggccacccuggggacugucauccuguuggucugcuuuugcgcaggcgcggcgcacucgaggggugaca

SEQ ID NO: 399628 - RNA, 73 nt, Human herpesvirus 8 (Kaposi`s sarcoma-associated h
uuccguaauaucuguuuuauauagugaggguucacgcaugcgcgagucccgacuaaugaggacaauuacugaa

SEQ ID NO: 399629 - RNA, 62 nt, Human herpesvirus 8 (Kaposi`s sarcoma-associated h
agaaaaauguauguugccaccggacgcaguuagguguccgguucccacccacacauuugucu

SEQ ID NO: 399630 - RNA, 58 nt, Human metapneumovirus
ugaguguaguagaacaauuaacugguaggaguccaaaacaguuaguuuuaauaccuca

SEQ ID NO: 399631 - RNA, 85 nt, Human parainfluenza virus 1 strain Washington/1964
uguaguacacacaauugauaugaauuauuggucugaugaugaaauaauuagagcaacuaguauauguacagcuaugacuauugca

SEQ ID NO: 399632 - RNA, 62 nt, Human respiratory syncytial virus
acccucaucuuauagauguuuuugugcacuuuggcauugcacaaucaucaacaagagggggu

SEQ ID NO: 399633 - RNA, 68 nt, Influenza A virus (A/Hong Kong/1073/99(H9N2))
gguucucuccgcauuugaugaaaggaggaacagguaccuagaggaacaucccagugcggggaaggacc

SEQ ID NO: 399634 - RNA, 61 nt, Influenza A virus (A/Puerto Rico/8/34/Mount Sinai(
cugguccaugcucauacccaagcagaaaguggcaggcccucuuuguaucagaauggaccag

SEQ ID NO: 399635 - RNA, 68 nt, Influenza B virus (B/Memphis/12/97)
guauugaagggaggaggagaaaauuucaucgaaguaaggaaagggucuccucuauucucuuacaaucc

SEQ ID NO: 399636 - RNA, 70 nt, Influenza B virus (B/Memphis/12/97)
aggguucaauguugaagaguacucuaugguuggguacgaagccauggcucuuuacaauauggcaacaccu

SEQ ID NO: 399637 - RNA, 99 nt, Japanese encephalitis virus
aauggugaaaugguugacccuuuucagcugggccuucuggugauguuucuggccacccaggagguccuucgcaagagguggacggccagauugaccauu

SEQ ID NO: 399638 - RNA, 71 nt, Japanese encephalitis virus
guggugaagcucaugagcaaaccuugggacgccauugccaacgucaccaccauggccaugacugacaccac

SEQ ID NO: 399639 - RNA, 59 nt, Molluscum contagiosum virus
gcgcggcgggggagagcucgcgcacgaagauuaccacguucgggccugccagccggcgc

SEQ ID NO: 399640 - RNA, 83 nt, Molluscum contagiosum virus
ucuaccgccggaggcacgcuggcacuugcgggugccucgaauccugucacugcugccgcggggcuagcgcugcagggcguagg

SEQ ID NO: 399641 - RNA, 78 nt, Molluscum contagiosum virus
cgcagcuauacgccaucgagcccgagucuuccagcucggagacguacagcgacucggacucgagcgacucuggcugcg

SEQ ID NO: 399642 - RNA, 61 nt, Molluscum contagiosum virus
gggcagcguguagcggcacaccagcaggcacucgacucgcugcgugcgcagcccgcugccc

SEQ ID NO: 399643 - RNA, 81 nt, Molluscum contagiosum virus
accagcgccaugcggaagggcgcgcgcagcaggcucgcgcgcgcaaagcgugccuccugcacgcgguccaucgcgcgcggu

SEQ ID NO: 399644 - RNA, 109 nt, Molluscum contagiosum virus
gcgcgcgcccagcgugugcggguagagcauguuggccagguagguguucucgaagcugagcucggggaaggccacuggcgagcguacgcccggcgcgccgggcgcgcgu

SEQ ID NO: 399645 - RNA, 55 nt, Molluscum contagiosum virus
uguccacguaccugucgagugcgcaaacacagcuucgagaggucaugaugguaca

SEQ ID NO: 399646 - RNA, 60 nt, Molluscum contagiosum virus
ucucgccagcgugcacgccgcgccgacucaggucgucggcgcgcagguccagcugcgaga

SEQ ID NO: 399647 - RNA, 55 nt, Molluscum contagiosum virus
cgcuuccuggacacgcgcaucguguacugccacauguccaagcugcaggaacgcg

SEQ ID NO: 399648 - RNA, 78 nt, Molluscum contagiosum virus
cagccgccugccgcgcucgugccgccugcgcgcacccgagggcgugcgcuuugaggaacuagugcugcugggcgguug

SEQ ID NO: 399649 - RNA, 58 nt, Molluscum contagiosum virus
agcgcuacgugcuggaacaggugcacgcgcgugcgcgcccugcgccgcacguauggcu

SEQ ID NO: 399650 - RNA, 66 nt, Molluscum contagiosum virus
ucacguagcgcucgcucgccgccgccacuuugucuuugaggauguaggcgagcauguucugcgcga

SEQ ID NO: 399651 - RNA, 99 nt, Molluscum contagiosum virus
cggagagacagcgcaaaggcggcucuccgcacacgugcucguugccgcaguggcgcgcaagacgaguagugcgcgagccgcgcgggcgcggauuuuccg

SEQ ID NO: 399652 - RNA, 58 nt, Molluscum contagiosum virus
aggaagcgcucuagguuggguguguacgcgucgcggcacacuaacagcgcgcuguccu

SEQ ID NO: 399653 - RNA, 91 nt, Molluscum contagiosum virus
ggucacugucagcucgggcucagaaggcgucgggagcaccgucagcgcaaaacacgcagacgcgacaccuuccgagcccgccgacguuacc

SEQ ID NO: 399654 - RNA, 78 nt, Molluscum contagiosum virus
gcucgcugaagcugugcgcgcaggccacgggguuggcgugcucgcugacgccggcgcgcgugggcagcaucucgacgc

SEQ ID NO: 399655 - RNA, 76 nt, Molluscum contagiosum virus
uacugcaacguggcgccgcugcuggaacaggugcgcaagcauuuccacuguacggagcgcgucuauccugucagua

SEQ ID NO: 399656 - RNA, 92 nt, Molluscum contagiosum virus
ggcagcgcuuguuucgcaugcacagccgcuuucugggcgcgugcgagcggcgcgcgcugagcgcggagcuggcguugccgagcgagcacgcc

SEQ ID NO: 399657 - RNA, 121 nt, Molluscum contagiosum virus
gugugcgcucacacggaacgagaacaagugugugugugugugugcucacacggaacgagaacaaguuugugugugcgcucacacggaacgagaacaagugugugugugugugugcucacac

SEQ ID NO: 399658 - RNA, 58 nt, Molluscum contagiosum virus
gggcuugucggaauuucugucugcgucccgagugacgcucgcguucucggcaaugccc

SEQ ID NO: 399659 - RNA, 76 nt, Molluscum contagiosum virus
gcgagcagaggcaugcuuuuuguucugcgcagggacgcgcuuuucgcacgagcgaaaacgcgugucuuccgcucgu

SEQ ID NO: 399660 - RNA, 74 nt, Molluscum contagiosum virus
gcggcgcuaccugcacaaggaguccacaggcaucaugcccaaggagauccgcgugugcgaggacguggcgcugc

SEQ ID NO: 399661 - RNA, 76 nt, Molluscum contagiosum virus
gccgcgacaucuuccgcuuccuggugggccaggacauuuacuaccccggcauccuggaagcgggcgagaucguggc

SEQ ID NO: 399662 - RNA, 61 nt, Molluscum contagiosum virus
ugucaagcacggaaaggaagugcucgagagccucccgcauuucccugccggugcguuggca

SEQ ID NO: 399663 - RNA, 90 nt, Molluscum contagiosum virus
ugcgucuuuacacagcaacgagcucgcggcgcagcaugagcggcgagacuagugccuucgucgucaggcugggcgcgcgagcuaggcgcg

SEQ ID NO: 399664 - RNA, 77 nt, Molluscum contagiosum virus
guggagaugcucauggacgcgcucgggcuuccgcgcacucuagcggucucgcgaguugcguucgugcgcgcacucac

SEQ ID NO: 399665 - RNA, 67 nt, Molluscum contagiosum virus
cggcgcgcugcuccgcucguucagcacguggaaguacuugucguaguuguagucgggcagcuugucg

SEQ ID NO: 399666 - RNA, 70 nt, Molluscum contagiosum virus
gccauuuaaaaagcggaaaaaugcacgcccgggcauggcucugcgucuggcuuuucguuuuuugcguggc

SEQ ID NO: 399667 - RNA, 55 nt, Molluscum contagiosum virus
guugguguggaaaaagacggucuugcccgcgggcacgccgucgaugcgcaccagc

SEQ ID NO: 399668 - RNA, 56 nt, Molluscum contagiosum virus
ugcgcgcguggugugcuaccagcuccucgggcaugauggacauguacacgcgcgcg

SEQ ID NO: 399669 - RNA, 89 nt, Molluscum contagiosum virus
cgcgcgcgcgcacgcgcuuggagcgcgggcgcagaggcaggggcguucccuugcgcuugugcguacgcgcgggcgcggacgcgggcgcg

SEQ ID NO: 399670 - RNA, 58 nt, Molluscum contagiosum virus
gcgccggcuggcaauguagcguaccagcgacugcagguugcgcacgccgugcuggcgc

SEQ ID NO: 399671 - RNA, 56 nt, Molluscum contagiosum virus
gcgccacgagcuugucccgccaggggcguccagcucgcuggacaaguugguggggc

SEQ ID NO: 399672 - RNA, 77 nt, Molluscum contagiosum virus
gccugcugcacgcacugcguuacucgggcugcuaugccucgggcauggccaccgggaugcgcauggcgcgcacaugc

SEQ ID NO: 399673 - RNA, 56 nt, Molluscum contagiosum virus
gccccugcacguucacgcgcuccaggagccccacgggcgcggagaacugcaccagc

SEQ ID NO: 399674 - RNA, 55 nt, Molluscum contagiosum virus
ggucgagucguucucgcgguacuugaagaccagguccugcgagcucgacaugucc

SEQ ID NO: 399675 - RNA, 85 nt, Molluscum contagiosum virus
gggcgacguugucgcgccacuugagacucgcauguccggcgauccaggacaucucgacguccacaguucuggccggcacacgccc

SEQ ID NO: 399676 - RNA, 56 nt, Molluscum contagiosum virus
ucgcguggaacuugacgccguagcgccgcagcagcugcggcuugggcaccgcgcgg

SEQ ID NO: 399677 - RNA, 85 nt, Molluscum contagiosum virus
gaggcgcccccgcggaagccgcgcccgcgagcuugacaacuccgaucucaucgcacgcuggugucgcuuccaugggcuccgcguc

SEQ ID NO: 399678 - RNA, 71 nt, Molluscum contagiosum virus
gcucgcggugcagcugccgcagagccgcgaaagcgucgugcuccacgcgcagcuucucugcgaucgcgggc

SEQ ID NO: 399679 - RNA, 74 nt, Molluscum contagiosum virus
gcgcgagcccggaugcgugcacgucgagcacggccagcaagaggucgugcgccgcggcgcgcgccaacucgcgc

SEQ ID NO: 399680 - RNA, 78 nt, Molluscum contagiosum virus
cggcgcggugcgucgcugcgcguggugggcacgcgcaagacgcccgacagcccgcacgugcacgcgcgcacgccgccg

SEQ ID NO: 399681 - RNA, 80 nt, Molluscum contagiosum virus
gcugcguggcauccgcgucccggcucugcucguccacgauaaucgucacgcgcacgucggcgcgcgcuagcuccagcagc

SEQ ID NO: 399682 - RNA, 90 nt, Molluscum contagiosum virus
gcagacguagcucugcucgcucugcgagaagccgggguacgcgaugaacuuguucucgacggggccguaguagggcuuuacguacacggc

SEQ ID NO: 399683 - RNA, 59 nt, Molluscum contagiosum virus
cgcugcgcgcggcgcuggcagguggcgcgaacuaaccaguucuagcagcugcgccagcg

SEQ ID NO: 399684 - RNA, 58 nt, Molluscum contagiosum virus
gugugugugcgugcucacacggaacgagaacaaguuugugugugcgcucacacggaac

SEQ ID NO: 399685 - RNA, 91 nt, Molluscum contagiosum virus
cgucgcggcguaucaucuccacaauggcggcgcgcgacuucgcggcgcucgcggcgcucgcggcgccgcuguccugugagugcgcucggcg

SEQ ID NO: 399686 - RNA, 80 nt, Molluscum contagiosum virus
ugaagcuguucauccggaggauccgcauccucuaggcgcagccuccgguuuucgcgggagcggccuccggagaagcuuua

SEQ ID NO: 399687 - RNA, 67 nt, Molluscum contagiosum virus
cuucuggcgggcagcucugcuggcaggcauccuuggcucggcuugccggcguccucuucccgcggag

SEQ ID NO: 399688 - RNA, 56 nt, Molluscum contagiosum virus
ggcaacgcaugcagucgacggcgcuguuucgcgcgcacuccagcagcaguguugcc

SEQ ID NO: 399689 - RNA, 74 nt, Molluscum contagiosum virus
ggcgcgcgcggucgacgggaacgaggucaucuucgugcugaagacgcuggccgugcccgccgacugccgccgcc

SEQ ID NO: 399690 - RNA, 66 nt, Molluscum contagiosum virus
gcgcacacgggcucgagcucggcguccggcacgcgguagcaaccguugggcucgauuucguugcgc

SEQ ID NO: 399691 - RNA, 93 nt, Molluscum contagiosum virus
cgcgccgcgcguagugcucuuuguggaccgcggcgucaucgacaucaagcgcgcucugcgccagcgccgccaggacagcauugccgcggcgug

SEQ ID NO: 399692 - RNA, 59 nt, Molluscum contagiosum virus
cauugaggagguguuugcacccccccgggaaaaggagggaagcgugucacuuuccgaug

SEQ ID NO: 399693 - RNA, 59 nt, Molluscum contagiosum virus
ggcagcgcaagcgcaggcaguacgcggccacguacgcgcgcagcagugccagcgcuguc

SEQ ID NO: 399694 - RNA, 63 nt, Molluscum contagiosum virus
ucaugggcucgggcaagaccaucaucgcgcugcucuucgcgcugaucguguccaaguucaaga

SEQ ID NO: 399695 - RNA, 59 nt, Molluscum contagiosum virus
gcacagcucgcgcugcgucugcgagaugagcgugucaaagcagucguacgugagcaugc

SEQ ID NO: 399696 - RNA, 59 nt, Molluscum contagiosum virus
cugggagcaccgcguggcgcgcgacgugugcucugugcgcgcagacguggugcucgugg

SEQ ID NO: 399697 - RNA, 92 nt, Molluscum contagiosum virus
ucugaaggcuuggcuucucgacuggagggggcaacgccguucgugccguguccguuguuccagcuagaagaggccgucccggcgacuucaga

SEQ ID NO: 399698 - RNA, 76 nt, Molluscum contagiosum virus
cguaaaggucuaagcgcaagccagagcuuggaagacaacucuuguugcuggggccugugcugugcagaacuucucg

SEQ ID NO: 399699 - RNA, 82 nt, Molluscum contagiosum virus
cugcgagucgcccguguucgcggagcugugccgcagcaacccgcggcucucgcggcccuucguguucgcggacggcgcgcag

SEQ ID NO: 399700 - RNA, 69 nt, Molluscum contagiosum virus
gugccgcgugcgcgggcaguuccgcgcguucgaacacguguucgaacugcucgcguugguuugcagcac

SEQ ID NO: 399701 - RNA, 56 nt, Molluscum contagiosum virus
gggcgcugaacuuagcgcgcagccggcgcgaaccggcacgccucaagcucgggccc

SEQ ID NO: 399702 - RNA, 57 nt, Molluscum contagiosum virus
cgcucacggccuucgcguuccggcggcuggaccugcgccagcgccuguccgugggcg

SEQ ID NO: 399703 - RNA, 102 nt, Molluscum contagiosum virus
gugcacguuuacguagcggcgcucgggcggguuguuggcguggcugugcaggcggauggcgcgcccgaugaucugcuugagcgacgccucguuccaugucau

SEQ ID NO: 399704 - RNA, 74 nt, Molluscum contagiosum virus
ucgagcacguccaugggcucguccuguacuggcguucccacgcccacagucaugugcccaugugcuacugccga

SEQ ID NO: 399705 - RNA, 63 nt, Molluscum contagiosum virus
gcucuggguccgguuccgaauaccagucggcgcugagcgccuucggagggucggagccugagc

SEQ ID NO: 399706 - RNA, 56 nt, Molluscum contagiosum virus
gcuccgcguggcagugcgcgggggaggcuccagagcgcgcagcgggcgcgcggggc

SEQ ID NO: 399707 - RNA, 118 nt, Molluscum contagiosum virus
gcgcuuccuguuagcaaaccggcggcggcuacgcggcgacaucuucaugguuacggagcguagcuucgugcucuaggugugagggugcgccuuuccucucccggcagcaggaagacgc

SEQ ID NO: 399708 - RNA, 65 nt, Molluscum contagiosum virus
gcgccagcggcgccagcagcugcuggauacugcgguugcucauccaggcgccgcgcucggggcgc

SEQ ID NO: 399709 - RNA, 70 nt, Molluscum contagiosum virus
guacagcggcuacugcaugcugugcuucguggagcagcggcuggacgacgugcagcaugccacgcuguac

SEQ ID NO: 399710 - RNA, 56 nt, Molluscum contagiosum virus
gggaccggcaccugcuacucccguacgcacggaaggagaaaagggguuguaguccc

SEQ ID NO: 399711 - RNA, 83 nt, Molluscum contagiosum virus
aguguccgugagugucgcgaccguagaagaugcuggcauguaccuugucacugucgcgacaacaacaagcuacacggucaacu

SEQ ID NO: 399712 - RNA, 74 nt, Molluscum contagiosum virus
uuuuccaugcgcaacgugcugcguagccuggccuuccgcgacuacgcgcugcgcggcgcggcgcgcguggagga

SEQ ID NO: 399713 - RNA, 81 nt, Molluscum contagiosum virus
acggcuccuccaccagcgccuucuugaccagcaccagcaccguccagcugguguagaggaagcgcaggugcuugagcaugu

SEQ ID NO: 399714 - RNA, 62 nt, Molluscum contagiosum virus
ggacaacgugcgccgcgcgccgcgcgugcgcacgcacuugcuggccgcccuggcgcuguucc

SEQ ID NO: 399715 - RNA, 67 nt, Molluscum contagiosum virus
ucgacggcgccucgagcgcgcuggacuugcgcgagcgagugaaggucgcguuccaggugcugggcga

SEQ ID NO: 399716 - RNA, 66 nt, Molluscum contagiosum virus
uugcgagcgguguugcugacgacugcggcgagaagaagcugucggucucgagcgccgccaucacga

SEQ ID NO: 399717 - RNA, 70 nt, Molluscum contagiosum virus
cucugugcggcgccguggcgcgcgacgacguugugcuccuuguccgagcgaaccgcggcagccuugcgag

SEQ ID NO: 399718 - RNA, 69 nt, Molluscum contagiosum virus
gcgcccgcguacacgugcacgcgcacggguguggcccccgaguacgugagcacaguguagcgcgcgcgc

SEQ ID NO: 399719 - RNA, 57 nt, Molluscum contagiosum virus
gugccgucagcacccaccaagaacuucucgaaguuccaggccacgucguugcggcac

SEQ ID NO: 399720 - RNA, 65 nt, Molluscum contagiosum virus
gcgugcgcaccugcgcaagauguacggcgcaagcaggucuaucuacaacuucgcugugcguaugc

SEQ ID NO: 399721 - RNA, 130 nt, Molluscum contagiosum virus
uguagcgguugaccagcuccacguugggguugucgggcgcuuuguaguugcgguggugcauccugcugaguaggaacauuucgagcggcugcgcgcgcgccgcgaacucggcgaacaggucuacuuccag

SEQ ID NO: 399722 - RNA, 60 nt, Molluscum contagiosum virus
guacgcgcgagcgagcgccggggcucugcgcagcgugcuggcguucguucgcgccagugc

SEQ ID NO: 399723 - RNA, 66 nt, Molluscum contagiosum virus
cgcgugggcggcagagagccggcgcucgcaccagaggcgcgcgccgcgccuguguccgucuccgcg

SEQ ID NO: 399724 - RNA, 58 nt, Molluscum contagiosum virus
ucggaggccgacuaucuucuuuacggaacgcccugguucuggaagaaucggacucgga

SEQ ID NO: 399725 - RNA, 130 nt, Molluscum contagiosum virus
gacgcccuccucgaccugcacgacccucuucgacuuacggacgcccuccucgaccugcacgacccucuucucgagugcacguaaagacggcgauucgugcucguguugugccugcgucuagccgcgcguc

SEQ ID NO: 399726 - RNA, 83 nt, Molluscum contagiosum virus
gcggcgagacgaaguccagcacgcgcgcgugcgggaagcgcaugaccagcgucaggcacgcgcgcgugucuuccagccgcugc

SEQ ID NO: 399727 - RNA, 59 nt, Molluscum contagiosum virus
ggugcucguacuccucaugaaugcgagcagcuggcucccuuggacggaaugcgagcgcc

SEQ ID NO: 399728 - RNA, 64 nt, Molluscum contagiosum virus
agacccaguggcguuugccgugacaagacacuguccuuccuccggcgaaaagccgcucgcgucu

SEQ ID NO: 399729 - RNA, 74 nt, Molluscum contagiosum virus
cgcucggugaugcgcgacauggacaucgccagugcguagucgcgcgcgggcagcaugucgcgcagcaccaggcg

SEQ ID NO: 399730 - RNA, 69 nt, Molluscum contagiosum virus
ggcugguguuuucguccauccacugcugcacguccacguaauugcagagaaacauguagaaggccagcu

SEQ ID NO: 399731 - RNA, 81 nt, Murray Valley encephalitis virus
agcugcuacagcuuggaugguguugcgagcaauggcuuuuccgucaaccucagcaauagccaugcccaugcuagcaaugcu

SEQ ID NO: 399732 - RNA, 69 nt, Puumala virus
guaaaguagaugagauaagugauguauuggauagugccuuacauccagacuccuuauccacugauuugc

SEQ ID NO: 399733 - RNA, 86 nt, SARS coronavirus
ucaugaugaccacacaaggcagaugggcuauguaaacguuuucgcaauuccguuuacgauacauagucuacucuugugcagaauga

SEQ ID NO: 399734 - RNA, 85 nt, SARS coronavirus
gcccugggugguucuauagcuguaaagauaacagagcauucuuggaaugcugaccuuuacaagcuuaugggccauuucucauggu

SEQ ID NO: 399735 - RNA, 64 nt, Seoul virus
uaguaguagacuccgcaagaaacagcaguuaaauaacagcaggaucauguggaguuugcuauua

SEQ ID NO: 399736 - RNA, 67 nt, Seoul virus
gucaguauuugcuuaucauuuuuugcuugcuauuugccaaaagaugaaauuaugugcaaucuuugac

SEQ ID NO: 399737 - RNA, 81 nt, Sin Nombre virus
gucuuuauuaagucaagaacacaaaaaagguaauauaaaucaagcuuauaagaucacauuugauguuguggcuguaaagac
